(19) United States
(12) Patent Application Publication
(10) Pub. No.: US 2022/0354963 A1
(43) Pub. Date: Nov. 10, 2022

(54) EXTRACELLULAR VESICLE LINKED TO MOLECULES AND USES THEREOF

(71) Applicant: Codiak BioSciences, Inc., Cambridge, MA (US)

(72) Inventors: Yi Zhang, Belmont, MA (US); Aaron R. Noyes, Melrose, MA (US); Adam T. Boutin, Arlington, MA (US)

(73) Assignee: Codiak BioSciences, Inc., Cambridge, MA (US)

(21) Appl. No.: 17/634,897

(22) PCT Filed: Aug. 14, 2020
(86) PCT No.: PCT/US2020/046560

§ 371 Date: Feb. 11, 2022

Related U.S. Application Data
(60) Provisional application No. 62/895,398, filed on Sep. 3, 2019.
(60) Provisional application No. 62/886,941, filed on Aug. 14, 2019.

(51) Int. Cl. A61K 47/69; A61K 47/28; A61K 47/22; A61K 47/54; A61K 47/55; A61P 35/00

(52) U.S. Cl. CPC A61K 47/6901; A61K 47/28; A61K 47/22; A61K 47/543; A61K 47/551; A61P 35/00

(57) ABSTRACT

The present disclosure relates to extracellular vesicles (e.g., exosomes) comprising a biologically active molecule covalently linked to the extracellular vesicle via an anchoring moiety, which may be useful as an agent for the prophylaxis or treatment of cancer or other diseases. Also provided herein are methods for producing the extracellular vesicles and methods for using the extracellular vesicles to treat diseases or disorders.

### CROSS REFERENCE TO RELATED APPLICATIONS

[0001] This PCT application claims the priority benefit of U.S. Provisional Application Nos. 62/886,941 filed Aug. 14, 2019; and 62/895,398 filed Sep. 3, 2019; each of which is incorporated herein by reference in its entirety.

### REFERENCE TO SEQUENCE LISTING SUBMITTED ELECTRONICALLY VIA EFS-WEB

[0002] The content of the electronically submitted sequence listing (Name: 4000.057PC02_Seglisting_ST25.txt, Size: 765,394 bytes; and Date of Creation: Aug. 14, 2020) submitted in this application is incorporated herein by reference in its entirety.

### TECHNICAL FIELD

[0003] The present disclosure provides extracellular vesicles (EVs), e.g., exosomes, comprising at least one biologically active molecule covalently linked to the extracellular vesicle, e.g., exosome, via an anchoring moiety, which can be useful as an agent for the prophylaxis or treatment of cancer and other diseases.

### BACKGROUND

[0004] Many bioactive compounds have potent biological activity that is of therapeutic interest. However, these compounds often exhibit toxicity in non-target organs. One way to limit exposure of non-target tissues is to chemically conjugate small molecules to affinity-based reagents such as antibodies, which can direct the therapeutic compound to specific cell types (Dosio, F. et al., Toxins (Basel) 3(7):848-883 (2011)), but this approach is limited by the number of molecules of the compound of interest that can be attached to an antibody (typically 2-6 molecules per antibody), and by the availability/existence of antibodies that specifically bind to targeted, relevant diseased/effector cells without binding to non-target cells. These two issues limit the use of antibody-drug conjugates (ADC) by decreasing potency and increasing systemic toxicity, respectively. Accordingly, there is a need for delivery systems with a higher payload than ADCs that can selectively target specific tissues or organs while at the same time limiting overall systemic exposure to the therapeutic compound.

[0005] EVs, e.g., exosomes, are important mediators of intercellular communication. They are also important biomarkers in the diagnosis and prognosis of many diseases, such as cancer. As drug delivery vehicles, EVs, e.g., exosomes, offer many advantages over traditional drug delivery methods (e.g., peptide immunization, DNA vaccines) as a new treatment modality in many therapeutic areas. However, despite its advantages, many EVs, e.g., exosomes, have had limited clinical efficacy. For example, dendritic-cell derived exosomes (DEX) were investigated in a Phase II clinical trial as maintenance immunotherapy after first line chemotherapy in patients with inoperable non-small cell lung cancer (NSCLC). However, the trial was terminated because the primary endpoint (at least 50% of patients with progression-free survival (PFS) at 4 months after chemotherapy cessation) was not reached. Besse, B., et al., Oncoimmunology 5(4):e1071008 (2015).

[0006] Accordingly, new and more effective engineered-EVs, e.g., exosomes, are necessary to better enable therapeutic use and other applications of EV-based technologies.

### BRIEF SUMMARY

[0007] The present disclosure is directed to an extracellular vesicle (EV) comprising a biologically active molecule (BAM) covalently linked to the EV via an anchoring moiety (AM), wherein the anchoring moiety comprises:

[AM]-[Linker]n-[BAM] Formula (I)

wherein n is any integer. In some aspects, n is any number between 0 and 10.

[0008] In other aspects, the anchoring moiety comprises a sterol, GM1, a lipid (e.g., a phospholipid or a fatty acid), a vitamin, a small molecule, a peptide, or a combination thereof. For example, the anchoring moiety comprises at least 6 carbon atoms, at least 7 carbon atoms, at least 8 carbon atoms, at least 9 carbon atoms, at least 10 carbon atoms, at least 11 carbon atoms, at least 12 carbon atoms, at least 13 carbon atoms, at least 14 carbon atoms, at least 15 carbon atoms, at least 16 carbon atoms, at least 17 carbon atoms, at least 18 carbon atoms, at least 19 carbon atoms, at least 20 carbon atoms, at least 25 carbon atoms, at least 30 carbon atoms, at least 35 carbon atoms, at least 40 carbon atoms, at least 45 carbon atoms, at least 50 carbon atoms, at least 55 carbon atoms, at least 60 carbon atoms, at least 65 carbon atoms, at least 70 carbon atoms, at least 75 carbon atoms, at least 80 carbon atoms, at least 85 carbon atoms, or at least 90 carbon atoms.

[0009] In other aspects, the anchoring moiety comprises a sterol, a steroid, a hopanoid, a hydroxysteroid, a secosteroid, an analog thereof, or any combination thereof. In some other aspects, the anchoring moiety comprises ergosterol, 7-dehydrocholesterol, cholesterol, 24S-hydroxycholesterol, lanosterol, cycloartenol, fucosterol, saringosterol, campesterol, β-sitosterol, sitostanol, coprostanol, avenasterol, stigmasterol, or any combination thereof.

[0010] In some aspects, the anchoring moiety is a cholesterol having the structure:

[chemical structure]

[0011] In some aspects, the anchoring moiety has the structure

[chemical structure]

[0012] In some aspects, the anchoring moiety comprises a steroid, which is dihydrotestosterone, uvaol, hecigenin, diosgenin, progesterone, cortisol, or any combination thereof.

[0013] In some aspects, the anchoring moiety comprises a lipid. In other aspects, the anchoring moiety comprises a C₂-C₆₀ chain. In some aspects, the anchoring moiety comprises C₄-C₄₀, C₂-C₃₈, C₂-C₃₆, C₂-C₃₄, C₂-C₃₂, C₂-C₃₀, C₄-C₃₀, C₂-C₂₈, C₄-C₂₈, C₂-C₂₆, C₄-C₂₆, C₂-C₂₄, C₄-C₂₄, C₆-C₂₄, C₈-C₂₄, C₈-C₂₄, C₁₀-C₂₄, C₂-C₂₂, C₄-C₂₂, C₆-C₂₂, C₈-C₂₂, C₁₀-C₂₂, C₂-C₂₀, C₄-C₂₀, C₆-C₂₀, C₈-C₂₀, C₁₀-C₂₀, C₂-C₁₈, C₄-C₁₈, C₆-C₁₈, C₈-C₁₈, C₁₀-C₁₈, C₁₂-C₁₈, C₁₄-C₁₈, C₁₆-C₁₈, C₂- C₁₆, C₄-C₁₆, C₆-C₁₆, C₈-C₁₆, C₁₀-C₁₆, C₁₂-C₁₆, C₁₄-C₁₆, C₂-C₁₅, C₄-C₁₅, C₆-C₁₅, C₈-C₁₅, C₉-C₁₅, C₁₀-C₁₅, C₁₁-C₁₅, C₁₂-C₁₅, C₁₃-C₁₅, C₂-C₁₄, C₄-C₁₄, C₆-C₁₄, C₈-C₁₄, C₉-C₁₄, C₁₀-C₁₄, C₁₁-C₁₄, C₁₂- C₁₄, C₂-C₁₃, C₄-C₁₃, C₆-C₁₃, C₇-C₁₃, C₈-C₁₃, C₉-C₁₃, C₁₀-C₁₃, C₁₀-C₁₃, C₁₁-C₁₃, C₂-C₁₂, C₄-C₁₂, C₆-C₁₂, C₇-C₁₂, C₈-C₁₂, C₉-C₁₂, C₁₀-C₁₂, C₂-C₁₁, C₄-C₁₁, C₆-C₁₁, C₇-C₁₁, C₇-C₁₁, C₈-C₁₁, C₉-C₁₁, C₂-C₁₀, C₄-C₁₀, C₂-C₉, C₄-C₉, C₂-C₈, C₂-C₇, C₄-C₂, C₂-C₆, or C₄-C₆, chain.

[0014] In some aspects, the anchoring moiety comprises a straight chain fatty acid, a branched fatty acid, an unsaturated fatty acid, a monounsaturated fatty acid, a polyunsaturated fatty acid, a hydroxyl fatty acid, a polycarboxylic acid, or any combination thereof. In some aspects, the anchoring moiety comprises a straight chain fatty acid, which is butyric acid, caproic acid, caprylic acid, capric acid, lauric acid, myristic acid, palmitic acid, stearic acid, arachic acid, behenic acid, lignoceric acid, hexacosanoic acid, octacosanoic acid, triacontanoic acid and n-dotriacontanoic acid, and those having an odd number of carbon atoms, such as propionic acid, n-valeric acid, enanthic acid, pelargonic acid, hendecanoic acid, tridecanoic acid, pentadecanoic acid, heptadecanoic acid, nonadecanoic acid, heneicosanoic acid, tricosanoic acid, pentacosanoic acid, heptacosanoic acid, or any combination thereof.

[0015] In some aspects, the anchoring moiety comprises a branched fatty acid, which is isobutyric acid, isocaproic acid, isocaprylic acid, isocapric acid, isolauric acid, 11-methyldodecanoic acid, isomyristic acid, 13-methyl-tetradecanoic acid, isopalmitic acid, 15-methyl-hexadecanoic acid, isostearic acid, 17-methyloctadecanoic acid, isoarachic acid, 19-methyl-eicosanoic acid, α-ethyl-hexanoic acid, α-hexyldecanoic acid, α-heptylundecanoic acid, 2-decyltetradecanoic acid, 2-undecyltetradecanoic acid, 2-decylpentadecanoic acid, 2-undecylpentadecanoic acid, Fine oxocol 1800 acid (product of Nissan Chemical Industries, Ltd.), anteiso fatty acids terminating with an isobutyl group, such as 6-methyl-octanoic acid, 8-methyl-decanoic acid, 10-methyl-dodecanoic acid, 12-methyl-tetradecanoic acid, 14-methyl-hexadecanoic acid, 16-methyl-octadecanoic acid, 18-methyl-eicosanoic acid, 20-methyl-docosanoic acid, 22-methyl-tetracosanoic acid, 24-methyl-hexacosanoic acid, and 26-methyloctacosanoic acid, or any combination thereof.

[0016] In some aspects, the anchoring moiety comprises an unsaturated fatty acid, which is 4-decenoic acid, caproleic acid, 4-dodecenoic acid, 5-dodecenoic acid, lauroleic acid, 4-tetradecenoic acid, 5-tetradecenoic acid, 9-tetradecenoic acid, palmitoleic acid, 6-octadecenoic acid, oleic acid, 9-octadecenoic acid, 11-octadecenoic acid, 9-eicosenoic acid, cis-11-eicosenoic acid, cetoleic acid, 13-docosenoic acid, 15-tetracosenoic acid, 17-hexacosenoic acid, 6,9,12,15-hexadecatetraenoic acid, linoleic acid, linolenic acid, α-eleostearic acid, β-eleostearic acid, punicic acid, 6,9,12,15-octadecatetraenoic acid, parinaric acid, 5,8,11,14-eicosatetraenoic acid, 5,8,11,14,17-eicosapentaenoic acid, 7,10,13,16,19-docosapentaenoic acid, 4,7,10,13,16,19-docosahexaenoic acid, or any combination thereof. In some aspects, the anchoring moiety comprises a hydroxy fatty acid, which is α-hydroxylauric acid, α-hydroxymyristic acid, α-hydroxypalmitic acid, α-hydroxystearic acid, ω-hydroxylauric acid, α-hydroxyarachic acid, 9-hydroxy-12-octadecenoic acid, ricinoleic acid, α-hydroxybehenic acid, 9-hydroxy-trans-10,12-octadecadienic acid, kamolenic acid, ipurolic acid, 9,10-dihydroxystearic acid, 12-hydroxystearic acid, or any combination thereof. In some aspects, the anchoring moiety comprises a polycarboxylic acid, which is oxalic acid, malonic acid, succinic acid, glutaric acid, adipic acid, pimelic acid, suberic acid, azelaic acid, sebacic acid, D,L-malic acid, or any combination thereof.

[0017] In some aspects, the anchoring moiety comprises a phospholipid. In some aspects, the phospholipid is phosphatidyl choline, phosphatidyl ethanolamine, phosphatidyl glycerol, phosphatidyl serine, phosphatidic acid, 2 lysophosphatidyl choline, sphingomyelin, or any combination thereof. In some aspects, the phospholipid is phosphatidylethanolamines, which is dilauroylphosphatidyl ethanolamine, dimyristoylphosphatidyl ethanolamine, dipalmitoylphosphatidyl ethanolamine, distearoylphosphatidyl ethanolamine, dioleoylphosphatidyl ethanolamine, 1-palmitoyl-2-oleylphosphatidyl ethanolamine, 1-oleyl-2-palmitoylphosphatidyl ethanolamine, dierucoylphosphatidyl ethanolamine, or any combination thereof. In some aspects, the phospholipid is phosphatidyl glycerol, which is dilauroylphosphatidyl glycerol, dimyristoylphosphatidyl glycerol, dipalmitoylphosphatidyl glycerol, distearoylphosphatidyl glycerol, dioleoylphosphatidyl glycerol, 1-palmitoyl-2-oleyl-phosphatidyl glycerol, 1-oleyl-2-palmitoyl-phosphatidyl glycerol, dierucoylphosphatidyl glycerol, or any combination thereof. In some aspects, the phospholipid is phosphatidyl serine, which is dilauroylphosphatidyl serine, dimyristoylphosphatidyl serine, dipalmitoylphosphatidyl serine, distearoylphosphatidyl serine, dioleoylphosphatidyl serine, 1-palmitoyl-2-oleyl-phosphatidyl serine, 1-oleyl-2-palmitoyl-phosphatidyl serine, dierucoylphosphatidyl serine, or any combination thereof. In some aspects, the phospholipid is phosphatidic acid, which is dilauroylphosphatidic acid, dimyristoylphosphatidic acid, dipalmitoylphosphatidic acid, distearoylphosphatidic acid, dioleoylphosphatidic acid, 1-palmitoyl-2-oleylphosphatidic acid, 1-oleyl-2-palmitoyl-phosphatidic acid, dierucoylphosphatidic acid, or any combination thereof. In some aspects, the phosphatidyl inositol, which is dilauroylphosphatidyl inositol, dimyristoylphosphatidyl inositol, dipalmitoylphosphatidyl inositol, distearoylphosphatidyl inositol, dioleoylphosphatidyl inositol, 1-palmitoyl-2-oleyl-phosphatidyl inositol, 1-oleyl-2-palmitoyl-phosphatidyl inositol, dierucoylphosphatidyl inositol, or any combination thereof. In some aspects, the phospholipid is a symmetric phospholipid, which is 1,2 dipropionyl sn-glycero 3 phosphocholine (03:0 PC); 1,2 dibutyryl sn glycero 3 phosphocholine (04:0 PC); 1,2 dipentanoyl sn glycero 3 phosphocholine (05:0 PC); 1,2 dihexanoyl sn glycero 3 phosphocholine (06:0 PC), 1,2 diheptanoyl sn glycero 3 phosphocholine (07:0 PC); 1,2 dioctanoyl sn glycero 3 phosphocholine (08:0 PC); 1,2 dinonanoyl sn glycero 3 phosphocholine (09:0 PC); 1,2 didecanoyl sn glycero 3 phosphocholine (10:0 PC); 1,2 diundecanoyl sn glycero 3 phosphocholine (11:0 PC, DUPC); 1,2 dilauroyl sn glycero 3 phosphocholine (12:0 PC); 1,2 ditridecanoyl sn glycero 3 phosphocholine (13:0 PC); 1,2 dimyristoyl sn glycero 3 phosphocholine (14:0 PC, DMPC); 1,2 dipentadecanoyl sn glycero 3 phosphocholine (15:0 PC); 1,2 dipalmitoyl sn glycero 3 phosphocholine (16:0 PC, DPPC); 1,2 diphytanoyl sn glycero 3 phosphocholine (4ME 16:0 PC); 1,2 diheptadecanoyl sn glycero 3 phosphocholine (17:0 PC); 1,2 distearoyl sn glycero 3 phosphocholine (18:0 PC, DSPC); 1,2 dinonadecanoyl sn glycero 3 phosphocholine (19:0 PC); 1,2 diarachidoyl sn glycero 3 phosphocholine (20:0 PC); 1,2 dihenarachidoyl sn glycero 3 phosphocholine (21:0 PC); 1,2 dibehenoyl sn glycero 3 phosphocholine (22:0 PC); 1,2 ditricosanoyl sn glycero 3 phosphocholine (23:0 PC); 1,2 dilignoceroyl sn glycero 3 phosphocholine (24:0 PC); 1,2 dimyristoleoyl sn glycero 3 phosphocholine (14:1 (Δ9-Cis) PC); 1,2 dimyristelaidoyl sn glycero 3 phosphocholine (14:1 (Δ9-Trans) PC); 1,2 dipalmitoleoyl sn glycero 3 phosphocholine (16:1 (Δ9-Cis) PC); 1,2 dipalmitelaidoyl sn glycero 3 phosphocholine (16:1 (Δ9-Trans) PC); 1,2 dipetroselenoyl sn glycero 3 phosphocholine (18:1 (Δ6-Cis) PC); 1,2 dioleoyl sn glycero 3 phosphocholine (18:1 (Δ9-Cis) PC, DOPC); 1,2 dielaidoyl sn glycero 3 phosphocholine (18:1 (Δ9-Trans) PC); 1,2 dilinoleoyl sn glycero 3 phosphocholine (18:2 (Cis) PC, DLPC); 1,2 dilinolenoyl sn glycero 3 phosphocholine (18:3 (Cis) PC, DLnPC); 1,2 dieicosenoyl sn glycero 3 phosphocholine (20:1 (Cis) PC); 1,2 diarachidonoyl sn glycero 3 phosphocholine (20:4 (Cis) PC, DAPC); 1,2 dierucoyl sn glycero 3 phosphocholine (22:1 (Cis) PC); 1,2 didocosahexaenoyl sn glycero 3 phosphocholine (22:6 (Cis) PC, DHAPC); 1,2 dinervonoyl sn glycero 3 phosphocholine (24:1 (Cis) PC); 1,2 dihexanoyl sn glycero 3 phosphoethanolamine (06:0 PE); 1,2 dioctanoyl sn glycero 3 phosphoethanolamine (08:0 PE); 1,2 didecanoyl sn glycero 3 phosphoethanolamine (10:0 PE); 1,2 dilauroyl sn glycero 3 phosphoethanolamine (12:0 PE), 1,2 dimyristoyl sn glycero 3 phosphoethanolamine (14:0 PE); 1,2 dipentadecanoyl sn glycero 3 phosphoethanolamine (15:0 PE); 1,2 dipalmitoyl sn glycero 3 phosphoethanolamine (16:0 PE); 1,2 diphytanoyl sn glycero 3 phosphoethanolamine (4ME 16:0 PE); 1,2 diheptadecanoyl sn glycero 3 phosphoethanolamine (17:0 PE); 1,2 distearoyl sn glycero 3 phosphoethanolamine (18:0 PE, DSPE); 1,2 dipalmitoleoyl sn glycero 3 phosphoethanolamine (16:1 PE); 1,2 dioleoyl sn glycero 3 phosphoethanolamine (18:1 (Δ9-Cis) PE, DOPE); 1,2 dielaidoyl sn glycero 3 phosphoethanolamine (18:1 (Δ9-Trans) PE); 1,2 dilinoleoyl sn glycero 3 phosphoethanolamine (18:2 PE, DLPE); 1,2 dilinolenoyl sn glycero 3 phosphoethanolamine (18:3 PE, DLnPE); 1,2 diarachidonoyl sn glycero 3 phosphoethanolamine (20:4 PE, DAPE); 1,2 didocosahexaenoyl sn glycero 3 phosphoethanolamine (22:6 PE, DHAPE); 1,2 di O octadecenyl sn glycero 3 phosphocholine (18:0 Diether PC); 1,2 dioleoyl sn glycero 3 phospho rac (1 glycerol) sodium salt (DOPG), or any combination thereof.

[0018] In some aspects, the phospholipid is a asymmetric phospholipid, which is 1 myristoyl 2 palmitoyl sn glycero 3 phosphocholine (14:0-16:0 PC, MPPC); 1 myristoyl 2 stearoyl sn glycero 3 phosphocholine (14:0-18:0 PC, MSPC); 1 palmitoyl 2 acetyl sn glycero 3 phosphocholine (16:0-02:0 PC); 1 palmitoyl 2 myristoyl sn glycero 3 phosphocholine (16:0-14:0 PC, PMPC); 1 palmitoyl 2 stearoyl sn glycero 3 phosphocholine (16:0-18:0 PC, PSPC); 1 palmitoyl 2 oleoyl sn glycero 3 phosphocholine (16:0-18:1 PC, POPC); 1 palmitoyl 2 linoleoyl sn glycero 3 phosphocholine (16:0-18:2 PC, PLPC); 1 palmitoyl 2 arachidonoyl sn glycero 3 phosphocholine (16:0-20:4 PC); 1 palmitoyl 2 docosahexaenoyl sn glycero 3 phosphocholine (14:0-22:6 PC); 1 stearoyl 2 myristoyl sn glycero 3 phosphocholine (18:0-14:0 PC, SMPC); 1 stearoyl 2 palmitoyl sn glycero 3 phosphocholine (18:0-16:0 PC, SPPC); 1 stearoyl 2 oleoyl sn glycero 3 phosphocholine (18:0-18:1 PC, SOPC); 1 stearoyl 2 linoleoyl sn glycero 3 phosphocholine (18:0-18:2 PC); 1 stearoyl 2 arachidonoyl sn glycero 3 phosphocholine (18:0-20:4 PC); 1 stearoyl 2 docosahexaenoyl sn glycero 3 phosphocholine (18:0-22:6 PC); 1 oleoyl 2 myristoyl sn glycero 3 phosphocholine (18:1-14:0 PC, OMPC); 1 oleoyl 2 palmitoyl sn glycero 3 phosphocholine (18:1-16:0 PC, OPPC); 1 oleoyl 2 stearoyl sn glycero 3 phosphocholine (18:1-18:0 PC, OSPC); 1 palmitoyl 2 oleoyl sn glycero 3 phosphoethanolamine (16:0-18:1 PE, POPE); 1 palmitoyl 2 linoleoyl sn glycero 3 phosphoethanolamine (16:0-18:2 PE); 1 palmitoyl 2 arachidonoyl sn glycero 3 phosphoethanolamine (16:0-20:4 PE); 1 palmitoyl 2 docosahexaenoyl sn glycero 3 phosphoethanolamine (16:0-22:6 PE); 1 stearoyl 2 oleoyl sn glycero 3 phosphoethanolamine (18:0-18:1 PE); 1 stearoyl 2 linoleoyl sn glycero 3 phosphoethanolamine (18:0-18:2 PE); 1 stearoyl 2 arachidonoyl sn glycero 3 phosphoethanolamine (18:0-20:4 PE); 1 stearoyl 2 docosahexaenoyl sn glycero 3 phosphoethanolamine (18:0-22:6 PE); 1 oleoyl 2 cholesterylhemisuccinoyl sn glycero 3 phosphocholine (OChemsPC), or any combination thereof.

[0019] In some aspects, the phospholipid is a lysolipid. In some aspects, the phospholipid is a lysoglycerophospholipid, a lysoglycosphingoliopid, a lysophosphatidylcholine, a lysophosphatidylethanolamine, a lysophosphatidylinositol, a lysophosphatidylserine, or any combination thereof. In some aspects, the phospholipid is 1 hexanoyl 2 hydroxy sn glycero 3 phosphocholine (06:0 Lyso PC); 1 heptanoyl 2 hydroxy sn glycero 3 phosphocholine (07:0 Lyso PC); 1 octanoyl 2 hydroxy sn glycero 3 phosphocholine (08:0 Lyso PC); 1 nonanoyl 2 hydroxy sn glycero 3 phosphocholine (09:0 Lyso PC); 1 decanoyl 2 hydroxy sn glycero 3 phosphocholine (10:0 Lyso PC); 1 undecanoyl 2 hydroxy sn glycero 3 phosphocholine (11:0 Lyso PC); 1 lauroyl 2 hydroxy sn glycero 3 phosphocholine (12:0 Lyso PC); 1 tridecanoyl 2 hydroxy sn glycero 3 phosphocholine (13:0 Lyso PC); 1 myristoyl 2 hydroxy sn glycero 3 phosphocholine (14:0 Lyso PC); 1 pentadecanoyl 2 hydroxy sn glycero 3 phosphocholine (15:0 Lyso PC); 1 palmitoyl 2 hydroxy sn glycero 3 phosphocholine (16:0 Lyso PC); 1 heptadecanoyl 2 hydroxy sn glycero 3 phosphocholine (17:0 Lyso PC); 1 stearoyl 2 hydroxy sn glycero 3 phosphocholine (18:0 Lyso PC); 1 oleoyl 2 hydroxy sn glycero 3 phosphocholine (18:1 Lyso PC); 1 nonadecanoyl 2 hydroxy sn glycero 3 phosphocholine (19:0 Lyso PC); 1 arachidoyl 2 hydroxy sn glycero 3 phosphocholine (20:0 Lyso PC); 1 behenoyl 2 hydroxy sn glycero 3 phosphocholine (22:0 Lyso PC); 1 lignoceroyl 2 hydroxy sn glycero 3 phosphocholine (24:0 Lyso PC); 1 hexacosanoyl 2 hydroxy sn glycero 3 phosphocholine (26:0 Lyso PC); 1 myristoyl 2 hydroxy sn glycero 3 phosphoethanolamine (14:0 Lyso PE); 1 palmitoyl 2 hydroxy sn glycero 3 phosphoethanolamine (16:0 Lyso PE); 1 stearoyl 2 hydroxy sn glycero 3 phosphoethanolamine (18:0 Lyso PE); 1 oleoyl 2 hydroxy sn glycero 3 phosphoethanolamine (18:1 Lyso PE); 1 hexadecyl sn glycero 3 phosphocholine (C16 Lyso PC); or any combination thereof.

[0020] In some aspects, the anchoring moiety comprises a vitamin. In some aspects, the anchoring moiety comprises vitamin D, vitamin K, vitamin E, or any combination thereof. In some aspects, the anchoring moiety further comprises a linker between the biologically active molecule and the anchoring moiety.

[0021] In some aspects, the linker comprises a non-cleavable linker. In some aspects, the non-cleavable linker comprises polyethylene glycol (PEG), glycerol, alkyl, succinimide, maleimide, or any combination thereof. In some aspects, the non-cleavable linker comprises polyethylene glycol (PEG) characterized by a formula R3-(O—CH₂—CH₂)ₙ— or R3-(0-CH₂—CH₂)ₙ—O—, wherein R3 being hydrogen, methyl or ethyl and n is an integer between 2 and 200. In some aspects, the non-cleavable linker comprises diethylene glycol, triethylene glycol, tetraethylene glycol (TEG), hexaethylene glycol (HEG), pentaethylene glycol, or any combination thereof.

[0022] In some aspects, the linker comprises a polyglycerol (PG) having the formula ((R3-O—(CH₂—CHOH—CH₂O)ₙ—), wherein R3 is hydrogen, methyl or ethyl, and n is an integer between 3 and 200. In some aspects, the linker comprises a diglycerol, triglycerol, tetraglycerol (TG), pentaglycerol, a hexaglycerol (HG), or any combination thereof.

[0023] In some aspects, the e linker comprises alkyl. In some aspects, the linker comprises alkenyl, alkynyl, arylalkyl, arylalkenyl, arylalkynyl, heteroarylalkyl, heteroarylalkenyl, heteroarylalkynyl, heterocyclylalkyl, heterocyclylalkenyl, heterocyclylalkynyl, Aryl, heteroaryl, heterocyclyl, cycloalkyl, cycloalkenyl, alkylarylalkyl, alkylarylalkenyl, alkylarylalkynyl, alkenylarylalkyl, alkenyl Reyl alkenyl, alkenyl aryl alkynyl, alkynyl aryl alkyl, alkynyl aryl alkenyl, alkynyl aryl alkynyl, alkyl heteroaryl alkyl, alkyl heteroaryl alkyl, alkyl heteroaryl alkenyl, alkyl heteroaryl alkynyl, alkenyl heteroaryl alkyl, alkenyl heteroaryl alkenyl, alkenyl heteroaryl alkynyl, alkynyl Heteroarylalkyl, alkynylheteroarylalkenyl, alkynylheteroarylalkynyl, alkylheterocyclylalkyl, alkylheterocyclylalkenyl, alkylheterocyclylalkynyl, alkenylheterocyclylalkyl, alkenylheterocyclylalkenyl, alkenylheterocyclylalkynyl, or any combination thereof.

[0024] In some aspects, the linker comprises a cleavable linker. In some aspects, the cleavable linker is a redox cleavable linker, a reactive oxygen species cleavable linker, a pH dependent cleavable linker, an enzymatic cleavable linker, a protease cleavable linker, an esterase cleavable linker, a phosphatase cleavable linker, a photoactivated cleavable linker, a self-immolative linker, or any combination thereof. In some aspects, the cleavable linker is a self-immolative linker. In some aspects, the cleavable linker is a cinnamyl group, a naphthyl group, a biphenyl group, a heterocyclic ring, a homoaromatic group, coumarin, furan, thiophene, thiazole, oxazole, isoxazole, pyrrole, pyrazole, pyridine, imidazone, triazole, or any combination thereof.

[0025] In some aspects, the linker has the formula:

-Aₐ-Y_{y}-

[0026] wherein each -A- is independently an amino acid unit, a is independently an integer from 1 to 12; -Y- is a spacer unit, and y is 0, 1, or 2. In some aspects, the -Aₐ- is a dipeptide, a tripeptide, a tetrapeptide, a pentapeptide, or a hexapeptide. In some aspects, a is 2 and -Aₐ- is selected from the group consisting of valine-alanine, valine-citrulline, phenylalanine-lysine, N-methylvaline-citrulline, cyclohexylalanine-lysine, and beta-alanine-lysine. In some aspects, the -Aₐ- is valine-alanine or valine-citrulline. In some aspects, y is 1. In some aspects, -Y- is a self-immolative spacer. In some aspects, -Y_{y}- has the formula (V):

[chemical structure]

wherein each R² is independently C₁₋₈ alkyl, —O—(C₁₋₈ alkyl), halogen, nitro, or cyano; and m is an integer from 0 to 4. In some aspects, m is 0, 1, or 2. In some aspects, m is 0.

[0027] In some aspects, the cleavable linker is valine-alanine-p-aminobenzylcarbamate or valine-citrulline-p-aminobenzylcarbamate. In some aspects, -Y- is a non self-immolative spacer. In some aspects, the non self-immolative spacer is -Gly- or -Gly-Gly-.

[0028] In some aspects, the anchoring moiety comprises:

[chemical structure]

[0029] In some aspects, the EV comprises an anchoring moiety selected from SEQ ID NOS: 301-324, 401-567, a fragment thereof, or a combination thereof, and a linker selected from the linker combinations of TABLE 1 and TABLE 2.

[0030] In some aspects, the anchoring moiety comprises a scaffold protein. In some aspects, the EV further comprises a scaffold moiety. In some aspects, the anchoring moiety and/or the scaffold moiety is scaffold X. In some aspects, the Scaffold X is selected from the group consisting of prostaglandin F2 receptor negative regulator (the PTGFRN protein); basigin (the BSG protein); immunoglobulin superfamily member 2 (the IGSF2 protein); immunoglobulin superfamily member 3 (the IGSF3 protein); immunoglobulin superfamily member 8 (the IGSF8 protein); integrin beta-1 (the ITGB1 protein); integrin alpha-4 (the ITGA4 protein); 4F2 cell-surface antigen heavy chain (the SLC3A2 protein); a class of ATP transporter proteins (the ATP1A1, ATP1A2, ATP1A3, ATP1A4, ATP1B3, ATP2B1, ATP2B2, ATP2B3, ATP2B4 proteins); a functional fragment thereof, and any combination thereof. In some aspects, the Scaffold X is PTGFRN protein or a functional fragment thereof. In some aspects, the Scaffold X comprises an amino acid sequence as set forth in SEQ ID NOS: 301-324, fragments thereof, and combinations thereof.

[0031] In some aspects, the anchoring moiety and/or the scaffold moiety is scaffold Y. In some aspects, the Scaffold Y is a scaffold protein that is capable of anchoring the biologically active molecule on the luminal surface of the extracellular vesicle and/or on the exterior surface of the extracellular vesicle. In some aspects, the Scaffold Y is selected from the group consisting of myristoylated alanine rich Protein Kinase C substrate (the MARCKS protein), myristoylated alanine rich Protein Kinase C substrate like 1 (the MARCKSL1 protein), brain acid soluble protein 1 (the BASP1 protein), a functional fragment thereof, and any combination thereof. In some aspects, the Scaffold Y is a BASP1 protein or a functional fragment thereof. In some aspects, the Scaffold X comprises an amino acid sequence as set forth in SEQ ID NOS: 401-567, fragments thereof, and combinations thereof.

[0032] In some aspects, the biologically active molecule is linked to the anchoring moiety and/or the scaffold moiety on the exterior surface of the EV. In some aspects, the biologically active molecule is linked to the anchoring moiety and/or the scaffold moiety on the luminal surface of the EV. In some aspects, the biologically active molecule is a polypeptide, a peptide, a polynucleotide (DNA and/or RNA), a chemical compound, or any combination thereof. In some aspects, the biologically active molecule is a chemical compound. In some aspects, the chemical compound is a small molecule. In some aspects, the biologically active molecule comprises an antisense oligonucleotide (ASO), a siRNA, a miRNA, a shRNA, a nucleic acid, or any combination thereof. In some aspects, the biologically active molecule comprises a peptide, a protein, an antibody or an antigen binding fragment thereof, or any combination thereof. In some aspects, the antigen binding fragment thereof comprises scFv, (scFv)2, Fab, Fab′, F(ab′)2, F(ab1)2, Fv, dAb, and Fd fragment, diabodys, antibody-related polypeptide, or any fragment thereof. In some aspects, the biologically active molecule comprises an ASO. In some aspects, the ASO targets a transcript, which is a STAT6 transcript, a CEBP/β transcript, a STAT3 transcript, a KRAS transcript, a NRAS transcript, an NLPR3 transcript, a PMP22 transcript, or any combination thereof. In some aspects, the STAT6 transcript comprises SEQ ID NO: 11 or SEQ ID NO: 13. In some aspects, the STAT6 ASO comprises a sequence selected from the group consisting of SEQ ID NO: 601 to SEQ ID NO: 703. In some aspects, the CEBP/β transcript comprises SEQ ID NO: 21 or SEQ ID NO: 23. In some aspects, the CEBP/β ASO comprises a sequence selected from the group consisting of SEQ ID NO: 704 to SEQ ID NO: 806. In some aspects, the STAT3 transcript comprises SEQ ID NO: 41 or SEQ ID NO: 43. In some aspects, the STAT3 ASO comprises a sequence selected from the group consisting of SEQ ID NO: 889 to SEQ ID NO: 988. In some aspects, the NRAS transcript comprises SEQ ID NO: 51 or SEQ ID NO: 53 In some aspects, the NRAS ASO comprises a sequence selected from the group consisting of SEQ ID NO: 989 to SEQ ID NO: 1088. In some aspects, the NLPR3 transcript comprises SEQ ID NO: 1 or SEQ ID NO: 3. In some aspects, the ASO comprises a sequence selected from the group consisting of SEQ ID NO: 101 to SEQ ID NO: 200. In some aspects, the KRAS transcript is a KRAS mutant transcript. In some aspects, the KRAS mutant is KRAS G12D. In some aspects, the KRAS transcript comprises SEQ ID NO: 31 or SEQ ID NO: 33. In some aspects, the ASO comprises a sequence selected from the group consisting of SEQ ID NO: 807 to SEQ ID NO: 888. In some aspects, the PMP22 transcript comprises SEQ ID NO: 58. In some aspects, the ASO comprises a sequence selected from the group consisting of SEQ ID NOS: 62-95 and 201-270.

[0033] In some aspects, the EV is an exosome.

[0034] In some aspects, the disclosure is directed to a pharmaceutical composition comprising the extracellular vesicle and a pharmaceutically acceptable carrier.

[0035] In some aspects, the disclosure is directed to a method of conjugating a biologically active molecule to an EV, comprising linking an anchoring moiety to the EV, a kit comprising the EV and instructions for use.

[0036] In some aspects, the disclosure is directed to a method of treating or preventing a disease or disorder in a subject in need thereof comprising administering the EV to the subject. In some aspects, the disease or disorder is a cancer, an inflammatory disorder, a neurodegenerative disorder, a central nervous diseases, or a metabolic disease. In some aspects, the EV is administered intravenously, intraperitoneally, nasally, orally, intramuscularly, subcutaneously, parenterally, or intratumorally.

### BRIEF DESCRIPTION OF THE DRAWINGS/FIGURES

[0037] FIG. 1A shows a table listing various ASO sequences that target the NLPR3 transcript. The table includes the following information (from left to right): (i) SEQ ID number designated for the ASO sequence only, (ii) the target start and end positions on the NLPR3 genomic sequence (SEQ ID NO: 1), (iii) the target start and end positions on the NLPR3 mRNA sequence (SEQ ID NO: 2), (iv) the ASO sequence without any particular design or chemical structure, and (v) ASO sequence with a chemical structure. The ASOs are from 5′ to 3′. The symbols in the chemical structures are as follows: Nb means LNA; dN means DNA; 5MdC means 5-Methyl-dC; Nm means MOE; and s means phosphorothioate.

[0038] FIG. 1B shows a table listing various STAT6 ASO sequences described herein and the location of the complimentary sequence for each in the mRNA sequence. The ASOs are from 5′ to 3′. The symbols in the chemical structures are as follows: Nb means LNA; dN means DNA; 5MdC means 5-Methyl-dC; Nm means MOE; and s means phosphorothioate.

[0039] FIG. 1C shows a table listing various CEBP/β ASO sequences described herein and the location of the complimentary sequence for each in the mRNA sequence. The ASOs are from 5′ to 3′. The symbols in the chemical structures are as follows: Nb means LNA; dN means DNA; 5MdC means 5-Methyl-dC; Nm means MOE; and s means phosphorothioate.

[0040] FIG. 1D shows a table listing various STAT3 ASO sequences described herein and the location of the complimentary sequence for each in the mRNA sequence. The ASOs are from 5′ to 3′. The symbols in the chemical structures are as follows: Nb means LNA; dN means DNA; 5MdC means 5-Methyl-dC; Nm means MOE; and s means phosphorothioate.

[0041] FIG. 1E shows a table listing various NRas ASO sequences described herein and the location of the complimentary sequence for each in the mRNA sequence. The ASOs are from 5′ to 3′. The symbols in the chemical structures are as follows: Nb means LNA; dN means DNA; 5MdC means 5-Methyl-dC; Nm means MOE; and s means phosphorothioate.

[0042] FIG. 1F shows a table listing various KRAS ASO sequences described herein and the location of the complimentary sequence for each in the pre-mRNA (SEQ ID NO: 30) or mRNA sequence (SEQ ID NO: 32). The ASOs are from 5′ to 3′. The symbols in the chemical structures are as follows: Nb means LNA; dN means DNA; 5MdC means 5-Methyl-dC; Nm means MOE; and s means phosphorothioate.

[0043] FIGS. 2A-2C are graphical representations of IL-1β production in monocytes (FIG. 2A), M0 macrophages (FIG. 2B), and mouse BMDM (FIG. 2C). The NLRP3 pathway was activated in each sample type by treatment with LPS for 3 hours and ATP for three hours. Samples were then treated with an increasing concentration of MCC950 (log μM), as indicated, and IL-1β levels were measured (pg/mL).

[0044] FIG. 3A is a timeline illustrating the dosing and sample collection schedule for intraperitoneal LPS challenge of mice. FIG. 3B is a graphical representation of serum IL-1β levels in mouse serum following administration of increasing amounts of MCC950.

[0045] FIGS. 4A-4D are graphical representations of Cy5 levels, as detected by fluorescence (MFI) and normalized to PBS controls. Cy5 is used as a marker of uptake of exosomes comprising Cy5 ASOs (“Exo ASO”; left) or free ASOs (right), as indicated, in various cell types isolated from the blood (FIG. 4A), liver (FIG. 4B), spleen (FIG. 4C), and a tumor (CT26; FIG. 4D). Horizontal lines indicate the average MFI. FIGS. 4E-4J are fluorescent images of bone marrow tissue samples taken from two donors each, showing uptake of exosomes comprising Cy5-reporter ASOs (FIGS. 4E-4F) or free ASO (FIGS. 4G-4H), as compared to PBS negative controls (FIGS. 4I-4J).

[0046] FIGS. 5A-5B are graphical representations of the normalized gene expression (%) of STAT6 (FIG. 5A) and CD163 (FIG. 5B) in polarized macrophages following treatment with STAT6 Exo ASO, STAT6 free ASO, or a scrambled Exo ASO (negative control), as indicated (FIGS. 5A-5B).

[0047] FIGS. 5C-5D are graphical representations of the normalized gene expression (%) of STAT6 (FIG. 5C) and CD163 (FIG. 5D) in polarized macrophages following treatment with STAT6 Exo ASO, STAT6 free ASO, or a scrambled Exo ASO (negative control), as indicated (FIGS. 5C-5D).

[0048] FIGS. 6A-6J are graphical representations of the expression of TGFβ1 (FIG. 6A), CD163 (FIG. 6B), STAT5b (FIG. 6C), STAT6 (FIG. 6D), CEBP/β (FIG. 6E), IL12β (FIG. 6F), AIF1 (FIG. 6G), MYC (FIG. 6H), HLA DQA (FIG. 6I), and CD74 (MIF) (FIG. 6A) in primary human macrophages untreated or treated with scramble Exo ASO, STAT6-Exo-ASO, STAT-6 free ASO, CEBP/β-Exo-ASO, or CEBP/β free ASO, as indicated.

[0049] FIGS. 7A-7F are graphical representations of the results of flow cytometry to isolate CD11b⁺ cells. FIGS. 7A-7C show CD45 expression pre-treatment (FIG. 7A), following treatment with a negative control (scramble Exo ASO; FIG. 7B), or post-treatment with an Exo-ASO (FIG. 7C). FIGS. 7D-7F show CD11b expression pre-treatment (FIG. 7D), following treatment with a negative control (scramble Exo ASO; FIG. 7E), or post-treatment with an Exo-ASO (FIG. 7F).

[0050] FIGS. 8A-8C are graphical representations of the expression of STAT6 (FIG. 8A), CEBP/β (FIG. 8B) and ARG1 (FIG. 8C) in CD11b-enriched cells as compared to non-enriched cells following exposure to scramble Exo-ASO (FIGS. 8A-8C), STAT6 free ASO (FIGS. 8A and 8C), CEBP/β free ASO (FIG. 8B), STAT6-Exo-ASO (FIGS. 8A and 8C), or CEBP/β-Exo-ASO (FIGS. 8B-8C).

[0051] FIGS. 9A-9L are graphical representations of the expression of STAT6 (FIG. 9A), CEBP/β (FIG. 9B), TGFβ1 (FIG. 9C), STAT3 (FIG. 9D), SIRP-α (FIG. 9E), CD47 (FIG. 9F), NOS2 (FIG. 9G), ARG1 (FIG. 9H), CD206 (FIG. 9I), CD274 (FIG. 9J), NLRP3 (FIG. 9K), CSF1R (FIG. 9L), CD36 (FIG. 9M), STAB1 (FIG. 9N), IL13 (FIG. 9O), PI3KG (FIG. 9P), LY6C (FIG. 9Q), LY6G (FIG. 9R), IFNβ1 (FIG. 9S), IFNγ (FIG. 9T), IFNα1 (FIG. 9U), and IL6Rα (FIG. 9V) in CD11b-enriched cells treated with scramble Exo ASO, STAT6-Exo-ASO, STAT-6 free ASO, or CEBP/β-Exo-ASO, as indicated.

[0052] FIGS. 10A and 10C are graphical representations of the normalized gene expression (%) of STAT6 (FIG. 10A) and TGFβ1 (FIG. 10C) in primary human M2 macrophages were polarized with IL-13/TGFβ treatment subsequently treated with STAT6 Exo ASO, STAT6 free ASO, or a scrambled Exo ASO (negative control), as indicated.

[0053] FIGS. 10B and 10D are graphical representations of the normalized gene expression (%) of CEBP/β (FIG. 10B) and TGFβ1 (FIG. 10D) in primary human M2 macrophages were polarized with IL-13/TGFβ treatment subsequently treated with CEBP/β Exo ASO, CEBP/β free ASO, or a scrambled Exo ASO (negative control), as indicated.

[0054] FIG. 11 is a graphical representation of exosome uptake, as evidenced by Cy5 levels, in Lung TD2 following nasal administration of a negative control (−C) or Exo-ASO-Cy5 (“IN”) to naïve mice or mice were treated with bleomycin to induce pulmonary fibrosis (“bleo”).

[0055] FIGS. 12A-12H are images of fluorescent in situ hybridization to detect exosome uptake by normal and induced fibrotic lung tissue.

[0056] FIGS. 13A-13H are images of in situ hybridization to detect exosome uptake by normal and induced fibrotic lung tissue.

[0057] FIG. 13I is a graphical representation showing the level of saturation in the in situ hybridization images, indicating the level of exosome uptake in normal and fibrotic tissue.

[0058] FIGS. 14A-14F are images of fluorescent in situ hybridization to detect exosome uptake by lung tissue in Hepa1-6 mice.

[0059] FIGS. 15A-15F are images of in situ hybridization to detect exosome uptake by lung tissue in Hepa1-6 mice.

[0060] FIG. 16A-16J shows the results of various IC50 experiments using NRas ASOs.

[0061] FIG. 17A-17N shows the results of various IC50 experiments using STAT3 ASOs.

[0062] FIG. 18 shows a graph depicting the results of STAT3 ASO experiments showing overall mRNA depletion.

[0063] FIG. 19 shows a graph depicting the results of NRas ASO experiments showing overall mRNA depletion.

[0064] FIG. 20 shows a tumor volume response curve post-inoculation with STAT3 Exo-ASO and STAT3 Free ASO.

[0065] FIG. 21 shows a STAT3 gene expression profile response using STAT3, Exo-ASO, STAT3 Free ASO, and STAT3 Free ASO 2X.

[0066] FIG. 22 shows percentages of infiltrating MDSCs/CD45s (CD11bHigh F40/80High/CD45) after exposure to PBS, Scramble Exo-ASO, STAT3 Exo-ASO MOE, and STAT3 Free ASO MOE.

[0067] FIG. 23 shows percentages of infiltrating MDSCs/Total MDSCs (Ly6GHigh CD11bHigh/IA/IELow) after exposure to PBS, Scramble Exo-ASO, STAT3 Exo-ASO MOE, and STAT3 Free ASO MOE.

[0068] FIG. 24 shows a normalized mRNA count after treatment with PBS, Scramble Exo-ASO, STAT3 Exo-ASO, and STAT3 Free ASO.

[0069] FIG. 25 presents a table showing that the amount of ASO molecules loaded per engineered exosome is affected by linker structure. Also shown are the structures of the constructs used.

[0070] FIG. 26 presents a table showing that the amount of ASO molecules loaded per native exosome is affected by linker structure. Also shown are the structures of the constructs used.

[0071] FIGS. 27A-27C show that the potency of Exo-ASO is affected by the ASO linker structure. The structures of the constructs C1-C9, T1-T9 and L1-L3 are those described in FIG. 25. FIG. 27A shows the potency of constructs with a cholesterol-C6 lipid anchor. FIG. 27B shows the potency of constructs with a tocopherol-C8 (L1) or tocopherol palmitate-C6 (L2 and L3) lipid anchor. FIG. 27C shows the potenty of constructs with a cholesterol-TEG lipid anchor.

[0072] FIG. 28 is a table showing the sequence of ASO molecules targeting Pmp22.

[0073] FIG. 29 is a table showing additional sequences of ASO molecules targeting Pmp22.

### DETAILED DESCRIPTION

[0074] The present disclosure is directed to extracellular vesicles (EVs), e.g., exosomes, comprising at least one biologically active molecule covalently linked to the EV, e.g., exosome, via an anchoring moiety and uses thereof. Non-limiting examples of the various aspects are shown in the present disclosure.

[0075] Before the present disclosure is described in greater detail, it is to be understood that this invention is not limited to the particular compositions or process steps described, as such can, of course, vary. As will be apparent to those of skill in the art upon reading this disclosure, each of the individual aspects described and illustrated herein has discrete components and features which can be readily separated from or combined with the features of any of the other several aspects without departing from the scope or spirit of the present invention. Any recited method can be carried out in the order of events recited or in any other order which is logically possible.

[0076] The headings provided herein are not limitations of the various aspects of the disclosure, which can be defined by reference to the specification as a whole. It is also to be understood that the terminology used herein is for the purpose of describing particular aspects only, and is not intended to be limiting, since the scope of the present disclosure will be limited only by the appended claims.

[0077] Accordingly, the terms defined immediately below are more fully defined by reference to the specification in its entirety.

### I. Definitions

[0078] In order that the present description can be more readily understood, certain terms are first defined. Additional definitions are set forth throughout the detailed description.

[0079] It is to be noted that the term “a” or “an” entity refers to one or more of that entity; for example, “a nucleotide sequence,” is understood to represent one or more nucleotide sequences. As such, the terms “a” (or “an”), “one or more,” and “at least one” can be used interchangeably herein. It is further noted that the claims can be drafted to exclude any optional element. As such, this statement is intended to serve as antecedent basis for use of such exclusive terminology as “solely,” “only” and the like in connection with the recitation of claim elements, or use of a negative limitation.

[0080] Furthermore, “and/or” where used herein is to be taken as specific disclosure of each of the two specified features or components with or without the other. Thus, the term “and/or” as used in a phrase such as “A and/or B” herein is intended to include “A and B,” “A or B,” “A” (alone), and “B” (alone). Likewise, the term “and/or” as used in a phrase such as “A, B, and/or C” is intended to encompass each of the following aspects: A, B, and C; A, B, or C; A or C; A or B; B or C; A and C; A and B; B and C; A (alone); B (alone); and C (alone).

[0081] It is understood that wherever aspects are described herein with the language “comprising,” otherwise analogous aspects described in terms of “consisting of” and/or “consisting essentially of” are also provided.

[0082] Unless defined otherwise, all technical and scientific terms used herein have the same meaning as commonly understood by one of ordinary skill in the art to which this disclosure is related. For example, the Concise Dictionary of Biomedicine and Molecular Biology, Juo, Pei-Show, 2nd ed., 2002, CRC Press; The Dictionary of Cell and Molecular Biology, 3rd ed., 1999, Academic Press; and the Oxford Dictionary Of Biochemistry And Molecular Biology, Revised, 2000, Oxford University Press, provide one of skill with a general dictionary of many of the terms used in this disclosure.

[0083] Units, prefixes, and symbols are denoted in their Systeme International de Unites (SI) accepted form. Numeric ranges are inclusive of the numbers defining the range. Where a range of values is recited, it is to be understood that each intervening integer value, and each fraction thereof, between the recited upper and lower limits of that range is also specifically disclosed, along with each subrange between such values. The upper and lower limits of any range can independently be included in or excluded from the range, and each range where either, neither or both limits are included is also encompassed within the disclosure. Thus, ranges recited herein are understood to be shorthand for all of the values within the range, inclusive of the recited endpoints. For example, a range of 1 to 10 is understood to include any number, combination of numbers, or sub-range from the group consisting of 1, 2, 3, 4, 5, 6, 7, 8, 9, and 10.

[0084] Where a value is explicitly recited, it is to be understood that values which are about the same quantity or amount as the recited value are also within the scope of the disclosure. Where a combination is disclosed, each subcombination of the elements of that combination is also specifically disclosed and is within the scope of the disclosure. Conversely, where different elements or groups of elements are individually disclosed, combinations thereof are also disclosed. Where any element of a disclosure is disclosed as having a plurality of alternatives, examples of that disclosure in which each alternative is excluded singly or in any combination with the other alternatives are also hereby disclosed; more than one element of a disclosure can have such exclusions, and all combinations of elements having such exclusions are hereby disclosed.

[0085] Nucleotides are referred to by their commonly accepted single-letter codes. Unless otherwise indicated, nucleotide sequences are written left to right in 5′ to 3′ orientation. Nucleotides are referred to herein by their commonly known one-letter symbols recommended by the IUPAC-IUB Biochemical Nomenclature Commission. Accordingly, A represents adenine, C represents cytosine, G represents guanine, T represents thymine, U represents uracil.

[0086] Amino acid sequences are written left to right in amino to carboxy orientation. Amino acids are referred to herein by either their commonly known three letter symbols or by the one-letter symbols recommended by the IUPAC-IUB Biochemical Nomenclature Commission.

[0087] The term “about” is used herein to mean approximately, roughly, around, or in the regions of. When the term “about” is used in conjunction with a numerical range, it modifies that range by extending the boundaries above and below the numerical values set forth. In general, the term “about” can modify a numerical value above and below the stated value by a variance of, e.g., 10 percent, up or down (higher or lower).

[0088] The terms “administration,” “administering,” and grammatical variants thereof refer to introducing a composition, such as an EV (e.g., exosome) of the present disclosure, into a subject via a pharmaceutically acceptable route. The introduction of a composition, such as an EV (e.g., exosome) of the present disclosure, into a subject is by any suitable route, including intratumorally, orally, pulmonarily, intranasally, parenterally (intravenously, intra-arterially, intramuscularly, intraperitoneally, or subcutaneously), rectally, intralymphatically, intrathecally, periocularly or topically. Administration includes self-administration and the administration by another. A suitable route of administration allows the composition or the agent to perform its intended function. For example, if a suitable route is intravenous, the composition is administered by introducing the composition or agent into a vein of the subject.

[0089] As used herein, the term “agonist” refers to a molecule that binds to a receptor and activates the receptor to produce a biological response. Receptors can be activated by either an endogenous or an exogenous agonist. Non-limiting examples of endogenous agonist include hormones, neurotransmitters, and cyclic dinucleotides. Non-limiting examples of exogenous agonist include drugs, small molecules, and cyclic dinucleotides. The agonist can be a full, partial, or inverse agonist.

[0090] The term “amino acid substitution” refers to replacing an amino acid residue present in a parent or reference sequence (e.g., a wild type sequence) with another amino acid residue. An amino acid can be substituted in a parent or reference sequence (e.g., a wild type polypeptide sequence), for example, via chemical peptide synthesis or through recombinant methods known in the art. Accordingly, a reference to a “substitution at position X” refers to the substitution of an amino acid present at position X with an alternative amino acid residue. In some aspects, substitution patterns can be described according to the schema AnY, wherein A is the single letter code corresponding to the amino acid naturally or originally present at position n, and Y is the substituting amino acid residue. In other aspects, substitution patterns can be described according to the schema An(YZ), wherein A is the single letter code corresponding to the amino acid residue substituting the amino acid naturally or originally present at position n, and Y and Z are alternative substituting amino acid residues that can replace A.

[0091] As used herein, the term “antagonist” refers to a molecule that blocks or dampens an agonist mediated response rather than provoking a biological response itself upon bind to a receptor. Many antagonists achieve their potency by competing with endogenous ligands or substrates at structurally defined binding sites on the receptors. Non-limiting examples of antagonists include alpha blockers, beta-blocker, and calcium channel blockers. The antagonist can be a competitive, non-competitive, or uncompetitive antagonist.

[0092] As used herein, the term “antibody” encompasses an immunoglobulin whether natural or partly or wholly synthetically produced, and fragments thereof. The term also covers any protein having a binding domain that is homologous to an immunoglobulin binding domain. “Antibody” further includes a polypeptide comprising a framework region from an immunoglobulin gene or fragments thereof that specifically binds and recognizes an antigen. Use of the term antibody is meant to include whole antibodies, polyclonal, monoclonal and recombinant antibodies, fragments thereof, and further includes single-chain antibodies, humanized antibodies, murine antibodies, chimeric, mouse-human, mouse-primate, primate-human monoclonal antibodies, anti-idiotype antibodies, antibody fragments, such as, e.g., scFv, (scFv)₂, Fab, Fab′, and F(ab′)₂, F(ab1)₂, Fv, dAb, and Fd fragments, diabodies, and antibody-related polypeptides. Antibody includes bispecific antibodies and multispecific antibodies so long as they exhibit the desired biological activity or function. In some aspects of the present disclosure, the biologically active molecule is an antibody or a molecule comprising an antigen binding fragment thereof.

[0093] The terms “antibody-drug conjugate” and “ADC” are used interchangeably and refer to an antibody linked, e.g., covalently, to a therapeutic agent (sometimes referred to herein as agent, drug, or active pharmaceutical ingredient) or agents. In some aspects of the present disclosure, the biologically active molecule is an antibody-drug conjugate.

[0094] As used herein, the term “approximately,” as applied to one or more values of interest, refers to a value that is similar to a stated reference value. In certain aspects, the term “approximately” refers to a range of values that fall within 10%, 9%, 8%, 7%, 6%, 5%, 4%, 3%, 2%, 1%, or less in either direction (greater than or less than) of the stated reference value unless otherwise stated or otherwise evident from the context (except where such number would exceed 100% of a possible value).

[0095] The term “aryl” refers to a carbocyclic aromatic group. Examples of aryl groups include, but are not limited to, phenyl, naphthyl and anthracenyl. A carbocyclic aromatic group can be unsubstituted or substituted with one or more groups including, but not limited to, —C₁₋₈ alkyl, —O—(C₁₋₈ alkyl), -aryl, —C(O)R′, —OC(O)R′, —C(O)OR′, —C(O)NH₂, —C(O)NHR′, —C(O)N(R′)₂—, —NHC(O)R′, —S(O)₂R′, —S(O)R′, —OH, -halogen, —N₃, —NH₂, —NH(R′), —N(R′)₂ and —CN, wherein each R′ is independently H, —C₁₋₈ alkyl, or aryl.

[0096] The term “arylene” refers to an aryl group which has two covalent bonds and can be in the ortho, meta, or para configurations as shown in the following structures:

[chemical structure]

in which the phenyl group can be unsubstituted or substituted with up to four groups including, but not limited to, —C₁₋₈ alkyl, —O—(C₁₋₈ alkyl), -aryl, —C(O)R′, —OC(O)R′, —C(O)OR′, —C(O)NH₂, —C(O)NHR′, —C(O)N(R′)₂—, —NHC(O)R′, —S(O)₂R′, —S(O)R′, —OH, -halogen, —N₃, —NH₂, —NH(R′), —N(R′)₂ and —CN, wherein each R′ is independently H, —C₁₋₈ alkyl, or aryl.

[0097] The term “biologically active molecule” as use herein refers to any molecule that can be attached to an EV, e.g., exosome, via an anchoring moiety, wherein the molecule can have a therapeutic or prophylactic effect in a subject in need thereof, or be used for diagnostic purposes. Accordingly, by way of example, the term biologically active molecule include proteins (e.g., antibodies, proteins, polypeptides, and derivatives, fragments, and variants thereof), lipids and derivatives thereof, carbohydrates (e.g., glycan portions in glycoproteins), or small molecules. In some aspects, the biologically active molecule is a radioisotope. In some aspects, the biologically active molecule is a detectable moiety, e.g., a radionuclide, a fluorescent molecule, or a contrast agent.

[0098] The term “C₁₋₈ alkyl” as used herein refers to a straight chain or branched, saturated hydrocarbon having from 1 to 8 carbon atoms. Representative “C₁₋₈ alkyl” groups include, but are not limited to, methyl, ethyl, n-propyl, n-butyl, n-pentyl, n-hexyl, n-heptyl, n-octyl, isopropyl, sec-butyl, isobutyl, tert-butyl, isopentyl, and 2-methylbutyl.

[0099] The term “C₁₋₁₀ alkylene” refers to a saturated, straight chain hydrocarbon group of the formula —(CH₂)₁₋₁₀—. Examples of C₁₋₁₀ alkylene include methylene, ethylene, propylene, butylene, pentylene, hexylene, heptylene, octylene, nonylene, and decalene.

[0100] The term “C₃₋₈ carbocycle” refers to a 3-, 4-, 5-, 6-, 7- or 8-membered saturated or unsaturated non-aromatic carbocyclic ring. Representative C₃₋₈ carbocycles include, but are not limited to, cyclopropyl, cyclobutyl, cyclopentyl, cyclopentadienyl, cyclohexyl, cyclohexenyl, 1,3-cyclohexadienyl, 1,4-cyclohexadienyl, cycloheptyl, 1,3-cycloheptadienyl, 1,3,5-cycloheptatrienyl, cyclooctyl, and -cyclooctadienyl. A C₃₋₈ carbocycle group can be unsubstituted or substituted with one or more groups including, but not limited to, —C₁₋₈ alkyl, —O—(C₁₋₈ alkyl), aryl, —C(O)R′, —OC(O)R′, —C(O)OR′, —C(O)NH₂, —C(O)NHR′, —C(O)N(R′)₂—, NHC(O)R′, —S(O)₂R′, —S(O)R′, —OH, -halogen, —N₃, —NH₂, —NH(R′), —N(R′)₂ and —CN, where each R′ is independently H, —C₁₋₈ alkyl, or aryl.

[0101] The term “C₃₋₈ carbocyclo” refers to a C₃₋₈ carbocycle group defined above wherein one or more of the carbocycle's hydrogen atoms is replaced with a bond.

[0102] The term “C₃₋₈ heterocycle” refers to an aromatic or non-aromatic C₃₋₈ carbocycle in which one to four of the ring carbon atoms are independently replaced with a heteroatom selected from the group consisting of O, S and N. Representative examples of a C₃₋₈ heterocycle include, but are not limited to, benzofuranyl, benzothiophene, indolyl, benzopyrazolyl, coumarinyl, isoquinolinyl, pyrrolyl, thiophenyl, furanyl, thiazolyl, imidazolyl, pyrazolyl, triazolyl, quinolinyl, pyrimidinyl, pyridinyl, pyridonyl, pyrazinyl, pyridazinyl, isothiazolyl, isoxazolyl and tetrazolyl. A C₃₋₈ heterocycle can be unsubstituted or substituted with up to seven groups including, but not limited to, —C₁₋₈ alkyl, —O—(C₁₋₈ alkyl), -aryl, —C(O)R′, —OC(O)R′, —C(O)OR′, —C(O)NH₂, —C(O)NHR′, —C(O)N(R′)₂, —NHC(O)R′, —S(O)₂R′, —S(O)R′, —OH, -halogen, —N₃, —NH₂, —NH(R′), —N(R′)₂, and —CN, wherein each R′ is independently H, —C₁₋₈ alkyl, or aryl.

[0103] The term “C₃₋₈ heterocyclo” refers to a C₃₋₈ heterocycle group defined above wherein one of the heterocycle group's hydrogen atoms is replaced with a bond. A C₃₋₈ heterocyclo can be unsubstituted or substituted with up to six groups including, but not limited to, —C₁₋₈ alkyl, —O—(C₁₋₈ alkyl), -aryl, —C(O)R′, —OC(O)R′, —C(O)OR′, —C(O)NH₂, —C(O)NHR′, —C(O)N(R′)₂, —NHC(O)R′, —S(O)₂R′, —S(O)R′, —OH, -halogen, —N₃, —NH₂, —NH(R′), —N(R′)₂ and —CN, wherein each R′ is independently H, —C₁₋₈ alkyl, or aryl.

[0104] A “conservative amino acid substitution” is one in which the amino acid residue is replaced with an amino acid residue having a similar side chain. Families of amino acid residues having similar side chains have been defined in the art, including basic side chains (e.g., lysine, arginine, histidine), acidic side chains (e.g., aspartic acid, glutamic acid), uncharged polar side chains (e.g., glycine, asparagine, glutamine, serine, threonine, tyrosine, cysteine), nonpolar side chains (e.g., alanine, valine, leucine, isoleucine, proline, phenylalanine, methionine, tryptophan), beta-branched side chains (e.g., threonine, valine, isoleucine) and aromatic side chains (e.g., tyrosine, phenylalanine, tryptophan, histidine). Thus, if an amino acid in a polypeptide is replaced with another amino acid from the same side chain family, the substitution is considered to be conservative. In another aspect, a string of amino acids can be conservatively replaced with a structurally similar string that differs in order and/or composition of side chain family members.

[0105] As used herein, the term “conserved” refers to nucleotides or amino acid residues of a polynucleotide sequence or polypeptide sequence, respectively, that are those that occur unaltered in the same position of two or more sequences being compared. Nucleotides or amino acids that are relatively conserved are those that are conserved amongst more related sequences than nucleotides or amino acids appearing elsewhere in the sequences.

[0106] In some aspects, two or more sequences are said to be “completely conserved” or “identical” if they are 100% identical to one another. In some aspects, two or more sequences are said to be “highly conserved” if they are at least 70% identical, at least 80% identical, at least 90% identical, or at least 95% identical to one another. In some aspects, two or more sequences are said to be “highly conserved” if they are about 70% identical, about 80% identical, about 90% identical, about 95%, about 98%, or about 99% identical to one another. In some aspects, two or more sequences are said to be “conserved” if they are at least 30% identical, at least 40% identical, at least 50% identical, at least 60% identical, at least 70% identical, at least 80% identical, at least 90% identical, or at least 95% identical to one another. In some aspects, two or more sequences are said to be “conserved” if they are about 30% identical, about 40% identical, about 50% identical, about 60% identical, about 70% identical, about 80% identical, about 90% identical, about 95% identical, about 98% identical, or about 99% identical to one another. Conservation of sequence may apply to the entire length of an polynucleotide or polypeptide or may apply to a portion, region or feature thereof.

[0107] As used herein, the term “conventional EV protein” means a protein previously known to be enriched in EVs.

[0108] As used herein, the term “conventional exosome protein” means a protein previously known to be enriched in exosomes, including but is not limited to CD9, CD63, CD81, PDGFR, GPI anchor proteins, lactadherin LAMP2, and LAMP2B, a fragment thereof, or a peptide that binds thereto.

[0109] The term “derivative” as used herein refers to an EV, e.g., exosome, component (e.g., a protein, such as Scaffold X and/or Scaffold Y, a lipid, or a carbohydrate) or to a biologically active molecule (e.g., a polypeptide, polynucleotide, lipid, carbohydrate, antibody or fragment thereof, PROTAC, etc.) that has been chemically modified to either introduce a reactive maleimide group or a thiol group susceptible of reaction with a maleimide group. For example, an antibody modified with a bifunctional reagent comprising (i) a group reacting, e.g., with free amino groups, and (ii) a maleimide group, could result in antibody derivative comprising a reactive maleimide group that may react with free thiol groups in a Scaffold X protein on the EV, e.g., exosome. Conversely, an Scaffold X on the EV, e.g., exosome, could be modified with a bifunctional reagent comprising (i) a group reacting, e.g., with free amino groups, and (ii) a maleimide group, resulting in a Scaffold X derivative comprising a reactive maleimide group that may react with free thiol groups in a biologically active molecule, e.g., an antibody.

[0110] The terms “excipient” and “carrier” are used interchangeably and refer to an inert substance added to a pharmaceutical composition to further facilitate administration of a compound.

[0111] As used herein, the terms “extracellular vesicle,” “EV,” and grammatical variants thereof, are used interchangeably and refer to a cell-derived vesicle comprising a membrane that encloses an internal space. Extracellular vesicles comprise all membrane-bound vesicles (e.g., exosomes, nanovesicles) that have a smaller diameter than the cell from which they are derived. In some aspects, extracellular vesicles range in diameter from 20 nm to 1000 nm, and can comprise various macromolecular payload either within the internal space (i.e., lumen), displayed on the external surface of the extracellular vesicle, and/or spanning the membrane. In some aspects, the payload can comprise nucleic acids, proteins, carbohydrates, lipids, small molecules, and/or combinations thereof. In certain aspects, an extracellular vehicle comprises a scaffold moiety. By way of example and without limitation, extracellular vesicles include apoptotic bodies, fragments of cells, vesicles derived from cells by direct or indirect manipulation (e.g., by serial extrusion or treatment with alkaline solutions), vesiculated organelles, and vesicles produced by living cells (e.g., by direct plasma membrane budding or fusion of the late endosome with the plasma membrane). Extracellular vesicles can be derived from a living or dead organism, explanted tissues or organs, prokaryotic or eukaryotic cells, and/or cultured cells. In some aspects, the extracellular vesicles are produced by cells that express one or more transgene products.

[0112] As used herein, the term “exosome” refers to an extracellular vesicle with a diameter between 20-300 nm (e.g., between 40-200 nm). Exosomes comprise a membrane that encloses an internal space (i.e., lumen), and, in some aspects, can be generated from a cell (e.g., producer cell) by direct plasma membrane budding or by fusion of the late endosome with the plasma membrane. In certain aspects, an exosome comprises a scaffold moiety. As described infra, exosome can be derived from a producer cell, and isolated from the producer cell based on its size, density, biochemical parameters, or a combination thereof. In some aspects, the exosomes of the present disclosure are produced by cells that express one or more transgene products.

[0113] In some aspects, EVs, e.g., exosomes, e.g., nanovesicles, of the present disclosure are engineered by covalently linking at least one biologically active molecule (e.g., a protein such as an antibody or ADC, a RNA or DNA such as an antisense oligonucleotide, a small molecule drug, a toxin) to the EV, e.g., exosome, e.g., nanovesicle, via an anchoring moiety.

[0114] In some aspects, the EVs, e.g., exosomes or nanovesicles, of the present disclosure can comprise various macromolecular payloads either within the internal space (i.e., lumen), displayed on the external (exterior) surface or internal (luminal) surface of the EV, and/or spanning the membrane. In some aspects, the payload can comprise, e.g., nucleic acids, proteins, carbohydrates, lipids, small molecules, and/or combinations thereof. In certain aspects, an EV, e.g, an exosome, comprises a scaffold moiety (e.g., Scaffold X). EVs, e.g., exosomes, can be derived from a living or dead organism, explanted tissues or organs, prokaryotic or eukaryotic cells, and/or cultured cells. In some aspects, the EVs, e.g., exosomes, are produced by cells that express one or more transgene products. In other aspects, the EVs of the present disclosure are without limitation nanovesicles, microsomes, microvesicles, extracellular bodies, or apoptotic bodies.

[0115] As used herein, the term “fragment” of a protein (e.g., a biologically active molecule such as a therapeutic protein, or an scaffold protein such as Scaffold X or Scaffold Y) refers to an amino acid sequence of a protein that is shorter than the naturally-occurring sequence, N- and/or C-terminally deleted or any part of the protein deleted in comparison to the naturally occurring protein.

[0116] As used herein, the term “functional fragment” refers to a protein fragment that retains protein function. Accordingly, in some aspects, a functional fragment of a Scaffold protein, e.g., Scaffold X protein, retains the ability to anchor a biologically active molecule on the luminal surface or on the external surface of the EV, e.g., exosome, via a maleimide moiety. Similarly, in certain aspects, a functional fragment of a Scaffold Y protein retains the ability to anchor a moiety on the luminal surface of the EV, e.g., exosome.

[0117] Whether a fragment is a functional fragment can be assessed by any art known methods to determine the protein content of EVs, e.g., exosomes, including Western Blots, FACS analysis and fusions of the fragments with autofluorescent proteins like, e.g., GFP. In certain aspects, a functional fragment of a Scaffold X protein retains, e.g., at least about 50%, at least about 60%, at least about 70%, at least about 80%, at least about 90% or at least about 100% of the ability of the naturally occurring Scaffold X protein to anchor a biologically active molecule on the luminal or on the external surface of the EV, e.g., exosome, via a maleimide moiety.

[0118] As used herein “anchoring” a biologically active molecule on the luminal or external surface of an EV (e.g., exosome) of the present disclosure via a scaffold protein refers to attaching covalently the biologically active molecule to the portion of the scaffold molecule located on the luminal or external surface of the EV (e.g., exosome), respectively.

[0119] In certain aspects, a functional fragment of a Scaffold Y protein retains, e.g., at least about 50%, at least about 60%, at least about 70%, at least about 80%, at least about 90% or at least about 100% of the ability of the naturally occurring Scaffold Y protein to anchor a moiety on the luminal surface of the EV, e.g., exosome.

[0120] As used herein, the term “homology” refers to the overall relatedness between polymeric molecules, e.g. between nucleic acid molecules (e.g. DNA molecules and/or RNA molecules) and/or between polypeptide molecules. Generally, the term “homology” implies an evolutionary relationship between two molecules. Thus, two molecules that are homologous will have a common evolutionary ancestor. In the context of the present disclosure, the term homology encompasses both to identity and similarity.

[0121] In some aspects, polymeric molecules are considered to be “homologous” to one another if at least 25%, 30%, 35%, 40%, 45%, 50%, 55%, 60%, 65%, 70%, 75%, 80%, 85%, 90%, 95%, or 99% of the monomers in the molecule are identical (exactly the same monomer) or are similar (conservative substitutions). The term “homologous” necessarily refers to a comparison between at least two sequences (polynucleotide or polypeptide sequences).

[0122] In the context of the present disclosure, substitutions (even when they are referred to as amino acid substitution) are conducted at the nucleic acid level, i.e., substituting an amino acid residue with an alternative amino acid residue is conducted by substituting the codon encoding the first amino acid with a codon encoding the second amino acid.

[0123] As used herein, the term “identity” refers to the overall monomer conservation between polymeric molecules, e.g., between polypeptide molecules or polynucleotide molecules (e.g. DNA molecules and/or RNA molecules). The term “identical” without any additional qualifiers, e.g., protein A is identical to protein B, implies the sequences are 100% identical (100% sequence identity). Describing two sequences as, e.g., “70% identical,” is equivalent to describing them as having, e.g., “70% sequence identity.”

[0124] Calculation of the percent identity of two polypeptide sequences, for example, can be performed by aligning the two sequences for optimal comparison purposes (e.g., gaps can be introduced in one or both of a first and a second polypeptide sequences for optimal alignment and non-identical sequences can be disregarded for comparison purposes). In certain aspects, the length of a sequence aligned for comparison purposes is at least 30%, at least 40%, at least 50%, at least 60%, at least 70%, at least 80%, at least 90%, at least 95%, or 100% of the length of the reference sequence. The amino acids at corresponding amino acid positions are then compared.

[0125] When a position in the first sequence is occupied by the same amino acid as the corresponding position in the second sequence, then the molecules are identical at that position. The percent identity between the two sequences is a function of the number of identical positions shared by the sequences, taking into account the number of gaps, and the length of each gap, which needs to be introduced for optimal alignment of the two sequences. The comparison of sequences and determination of percent identity between two sequences can be accomplished using a mathematical algorithm.

[0126] Suitable software programs are available from various sources, and for alignment of both protein and nucleotide sequences. One suitable program to determine percent sequence identity is bl2seq, part of the BLAST suite of program available from the U.S. government's National Center for Biotechnology Information BLAST web site (blast.ncbi.nlm.nih.gov). Bl2seq performs a comparison between two sequences using either the BLASTN or BLASTP algorithm. BLASTN is used to compare nucleic acid sequences, while BLASTP is used to compare amino acid sequences. Other suitable programs are, e.g., Needle, Stretcher, Water, or Matcher, part of the EMBOSS suite of bioinformatics programs and also available from the European Bioinformatics Institute (EBI) at www.ebi.ac.uk/Tools/psa.

[0127] Sequence alignments can be conducted using methods known in the art such as MAFFT, Clustal (ClustalW, Clustal X or Clustal Omega), MUSCLE, etc.

[0128] Different regions within a single polynucleotide or polypeptide target sequence that aligns with a polynucleotide or polypeptide reference sequence can each have their own percent sequence identity. It is noted that the percent sequence identity value is rounded to the nearest tenth. For example, 80.11, 80.12, 80.13, and 80.14 are rounded down to 80.1, while 80.15, 80.16, 80.17, 80.18, and 80.19 are rounded up to 80.2. It also is noted that the length value will always be an integer.

[0129] In certain aspects, the percentage identity (% ID) or of a first amino acid sequence (or nucleic acid sequence) to a second amino acid sequence (or nucleic acid sequence) is calculated as % ID=100×(Y/Z), where Y is the number of amino acid residues (or nucleobases) scored as identical matches in the alignment of the first and second sequences (as aligned by visual inspection or a particular sequence alignment program) and Z is the total number of residues in the second sequence. If the length of a first sequence is longer than the second sequence, the percent identity of the first sequence to the second sequence will be higher than the percent identity of the second sequence to the first sequence.

[0130] One skilled in the art will appreciate that the generation of a sequence alignment for the calculation of a percent sequence identity is not limited to binary sequence-sequence comparisons exclusively driven by primary sequence data. It will also be appreciated that sequence alignments can be generated by integrating sequence data with data from heterogeneous sources such as structural data (e.g., crystallographic protein structures), functional data (e.g., location of mutations), or phylogenetic data. A suitable program that integrates heterogeneous data to generate a multiple sequence alignment is T-Coffee, available at www.tcoffee.org, and alternatively available, e.g., from the EBI. It will also be appreciated that the final alignment used to calculate percent sequence identity can be curated either automatically or manually.

[0131] As used herein, the term “immune modulator” refers to an agent that acts on a target (e.g., a target cell) that is contacted with the EV (e.g., exosome), and regulates the immune system. Non-limiting examples of immune modulator that can be introduced into an EV (e.g., exosome) and/or a producer cell include agents such as, modulators of checkpoint inhibitors, ligands of checkpoint inhibitors, cytokines, derivatives thereof, or any combination thereof. The immune modulator can also include an agonist, an antagonist, an antibody, an antigen-binding fragment, a polynucleotide, such as siRNA, miRNA, lncRNA, mRNA or DNA, or a small molecule. In some aspects of the present disclosure, the biologically active molecule is an immune modulator.

[0132] An “immune response”, as used herein, refers to a biological response within a vertebrate against foreign agents or abnormal, e.g., cancerous cells, which response protects the organism against these agents and diseases caused by them. An immune response is mediated by the action of one or more cells of the immune system (for example, a T lymphocyte, B lymphocyte, natural killer (NK) cell, macrophage, eosinophil, mast cell, dendritic cell or neutrophil) and soluble macromolecules produced by any of these cells or the liver (including antibodies, cytokines, and complement) that results in selective targeting, binding to, damage to, destruction of, and/or elimination from the vertebrate's body of invading pathogens, cells or tissues infected with pathogens, cancerous or other abnormal cells, or, in cases of autoimmunity or pathological inflammation, normal human cells or tissues. An immune reaction includes, e.g., activation or inhibition of a T cell, e.g., an effector T cell, a Th cell, a CD4+ cell, a CD8+ T cell, or a Treg cell, or activation or inhibition of any other cell of the immune system, e.g., NK cell. Accordingly an immune response can comprise a humoral immune response (e.g., mediated by B-cells), cellular immune response (e.g., mediated by T cells), or both humoral and cellular immune responses. In some aspects of the present disclosure, the biologically active molecule is a molecule capable of eliciting an immune response.

[0133] In some aspects, an immune response is an “inhibitory” immune response. An inhibitory immune response is an immune response that blocks or diminishes the effects of a stimulus (e.g., antigen). In certain aspects, the inhibitory immune response comprises the production of inhibitory antibodies against the stimulus. In some aspects, an immune response is a “stimulatory” immune response. A stimulatory immune response is an immune response that results in the generation of effectors cells (e.g., cytotoxic T lymphocytes) that can destroy and clear a target antigen (e.g., tumor antigen or viruses).

[0134] The term “immunoconjugate” as used herein refers to a compound comprising a binding molecule (e.g., an antibody) and one or more moieties, e.g., therapeutic or diagnostic moieties, chemically conjugated to the binding molecule. In general an immunoconjugate is defined by a generic formula: A-(L-M)n wherein A is a binding molecule (e.g., an antibody), L is an optional linker, and M is a heterologous moiety which can be for example a therapeutic agent, a detectable label, etc., and n is an integer. In some aspects, multiple heterologous moieties can be chemically conjugated to the different attachment points in the same binding molecule (e.g., an antibody). In other aspects, multiple heterologous moieties can be concatenated and attached to an attachment point in the binding molecule (e.g., an antibody). In some aspects, multiple heterologous moieties (being the same or different) can be conjugated to the binding molecule (e.g., an antibody).

[0135] Immunoconjugates can also be defined by the generic formula in reverse order. In some aspects, the immunoconjugate is an “antibody-Drug Conjugate” (“ADC”). In the context of the present disclosure the term “immunoconjugate” is not limited to chemically or enzymatically conjugates molecules. The term “immunoconjugate” as used in the present disclosure also includes genetic fusions. In some aspects of the present disclosure, the biologically active molecule is an immunoconjugate.

[0136] As used herein, the terms “isolated,” “purified,” “extracted,” and grammatical variants thereof are used interchangeably and refer to the state of a preparation of desired EVs (e.g., a plurality of EVs of known or unknown amount and/or concentration), that has undergone one or more processes of purification, e.g., a selection or an enrichment of the desired EV, e.g., exosome, preparation. In some aspects, isolating or purifying as used herein is the process of removing, partially removing (e.g., a fraction) of the EVs, e.g., exosomes, from a sample containing producer cells. In some aspects, an isolated EV, e.g., exosome, composition has no detectable undesired activity or, alternatively, the level or amount of the undesired activity is at or below an acceptable level or amount. In other aspects, an isolated EV, e.g., exosome, composition has an amount and/or concentration of desired EVs, e.g., exosomes, at or above an acceptable amount and/or concentration. In other aspects, the isolated EVs, e.g., exosome, composition is enriched as compared to the starting material (e.g., producer cell preparations) from which the composition is obtained. This enrichment can be by at least about 10%, at least about 20%, at least about 30%, at least about 40%, at least about 50%, at least about 60%, at least about 70%, at least about 80%, at least about 90%, at least about 95%, at least about 96%, at least about 97%, at least about 98%, at least about 99%, at least about 99.9%, at least about 99.99%, at least about 99.999%, at least about 99.9999%, or greater than 99.9999% as compared to the starting material. In some aspects, isolated EV, e.g. exosome, preparations are substantially free of residual biological products. In some aspects, the isolated EV, e.g., exosome, preparations are 100% free, at least about 99% free, at least about 98% free, at least about 97% free, at least about 96% free, at least about 95% free, at least about 94% free, at least about 93% free, at least about 92% free, at least about 91% free, or at least about 90% free of any contaminating biological matter. Residual biological products can include abiotic materials (including chemicals) or unwanted nucleic acids, proteins, lipids, or metabolites. Substantially free of residual biological products can also mean that the EV, e.g., exosome, composition contains no detectable producer cells and that only EVs, e.g., exosomes, are detectable.

[0137] The terms “linked,” “fused,” and grammatical variants thereof are used interchangeably and refer to a first moiety, e.g., a first amino acid sequence or nucleotide sequence, covalently or non-covalently joined to a second moiety, e.g., a second amino acid sequence or nucleotide sequence, respectively. The first moiety can be directly joined or juxtaposed to the second moiety or alternatively an intervening moiety can covalently join the first moiety to the second moiety. The term “linked” means not only a fusion of a first moiety to a second moiety at the C-terminus or the N-terminus, but also includes insertion of the whole first moiety (or the second moiety) into any two points, e.g., amino acids, in the second moiety (or the first moiety, respectively). In one aspect, the first moiety is linked to a second moiety by a peptide bond or a linker. The first moiety can be linked to a second moiety by a phosphodiester bond or a linker. The linker can be a peptide or a polypeptide (for polypeptide chains) or a nucleotide or a nucleotide chain (for nucleotide chains) or any chemical moiety (for polypeptide or polynucleotide chains or any chemical molecules). The term “linked” is also indicated by a hyphen (-). In some aspects, a Scaffold X protein on an EV, e.g., exosome, can be linked or fused to a biologically active molecule via a maleimide moiety.

[0138] As used herein the term “lumen-engineered EV” refers to an EV, e.g., exosome with the luminal surface of the membrane or the lumen of the EV, e.g., exosome, modified in its composition so that the luminal surface or the lumen of the engineered EV, e.g., exosome, is different from that of the EV, e.g., exosome, prior to the modification or of the naturally occurring EV, e.g., exosome.

[0139] The engineering can be directly in the lumen (i.e., the void within the EV) or in the membrane of the EV (e.g., exosome), in particular the luminal surface of the EV, so that the lumen and/or the luminal surface of the EV, e.g., exosome is changed. For example, the membrane is modified in its composition of a protein, a lipid, a small molecule, a carbohydrate, etc. so that the luminal surface of the EV, e.g., exosome is modified. Similarly, the contents in the lumen can be modified. The composition can be changed by a chemical, a physical, or a biological method or by being produced from a cell previously modified by a chemical, a physical, or a biological method. Specifically, the composition can be changed by a genetic engineering or by being produced from a cell previously modified by genetic engineering. In some aspects, a lumen-engineered EV, e.g., lumen-engineered exosome, comprises an exogenous protein (i.e., a protein that the EV, e.g., exosome, does not naturally express) or a fragment or variant thereof that can be exposed on the luminal surface or lumen of the EV, e.g., exosome, or can be an anchoring point (attachment) for a moiety exposed on the inner layer of the EV, e.g., exosome. In other aspects, a lumen-engineered EV, e.g., a lumen-engineered exosome, comprises a higher expression of a natural EV, e.g., exosome, protein (e.g., Scaffold X or Scaffold Y) or a fragment or variant thereof that can be exposed to the lumen of the EV, e.g., exosome, or can be an anchoring point (attachment) for a moiety exposed on the luminal surface of the EV, e.g., exosome.

[0140] As used herein, the term “macromolecule” refers to nucleic acids, proteins, lipids, carbohydrates, metabolites, or combinations thereof.

[0141] As used herein, the term “macromolecule” refers to nucleic acids, proteins, lipids, carbohydrates, metabolites, or combinations thereof.

[0142] The term “modified,” when used in the context of EVs, e.g., exosomes, described herein, refers to an alteration or engineering of an EV, e.g., exosome and/or its producer cell, such that the modified EV, e.g., exosome, is different from a naturally-occurring EV, e.g., exosome. In some aspects, a modified EV, e.g., exosome, described herein comprises a membrane that differs in composition of a protein, a lipid, a small molecular, a carbohydrate, etc. compared to the membrane of a naturally-occurring EV, e.g., exosome. E.g., the membrane comprises higher density or number of natural EV, e.g., exosome, proteins and/or membrane comprises proteins that are not naturally found in EV, e.g., exosomes. In certain aspects, such modifications to the membrane change the exterior surface of the EV, e.g., exosome (e.g., surface-engineered EVs and exosomes described herein). In certain aspects, such modifications to the membrane change the luminal surface of the EV, e.g., exosome (e.g., lumen-engineered EV and exosomes described herein).

[0143] As used herein the terms “modified protein” or “protein modification” refers to a protein having at least 15% identity to the non-mutant amino acid sequence of the protein. A modification of a protein includes a fragment or a variant of the protein. A modification of a protein can further include chemical, or physical modification to a fragment or a variant of the protein.

[0144] As used herein, the terms “modulate,” “modify,” and grammatical variants thereof, generally refer when applied to a specific concentration, level, expression, function or behavior, to the ability to alter, by increasing or decreasing, e.g., directly or indirectly promoting/stimulating/up-regulating or interfering with/inhibiting/down-regulating the specific concentration, level, expression, function or behavior, such as, e.g., to act as an antagonist or agonist. In some instances a modulator can increase and/or decrease a certain concentration, level, activity or function relative to a control, or relative to the average level of activity that would generally be expected or relative to a control level of activity.

[0145] As used herein, the term “nanovesicle” refers to an extracellular vesicle with a diameter between 20-250 nm (e.g., between 30-150 nm) and is generated from a cell (e.g., producer cell) by direct or indirect manipulation such that the nanovesicle would not be produced by the cell without the manipulation. Appropriate manipulations of the cell to produce the nanovesicles include but are not limited to serial extrusion, treatment with alkaline solutions, sonication, or combinations thereof. In some aspects, production of nanovesicles can result in the destruction of the producer cell. In some aspects, population of nanovesicles described herein are substantially free of vesicles that are derived from cells by way of direct budding from the plasma membrane or fusion of the late endosome with the plasma membrane. In certain aspects, a nanovesicle comprises a scaffold moiety, e.g., Scaffold X and/or Scaffold Y. Nanovesicles, once derived from a producer cell, can be isolated from the producer cell based on its size, density, biochemical parameters, or a combination thereof.

[0146] As used herein, the term “payload” refers to a biologically active molecule (e.g., a therapeutic agent) that acts on a target (e.g., a target cell) that is contacted with the EV, e.g., exosome, of the present disclosure. Non-limiting examples of payloads that can be introduced into an EV, e.g., exosome, include therapeutic agents such as, nucleotides (e.g., nucleotides comprising a detectable moiety or a toxin or that disrupt transcription), nucleic acids (e.g., DNA or mRNA molecules that encode a polypeptide such as an enzyme, or RNA molecules that have regulatory function such as miRNA, dsDNA, lncRNA, and siRNA), amino acids (e.g., amino acids comprising a detectable moiety or a toxin or that disrupt translation), polypeptides (e.g., enzymes), lipids, carbohydrates, and small molecules (e.g., small molecule drugs and toxins). In certain aspects, a payload comprises an antigen. As used herein, the term “antigen” refers to any agent that when introduced into a subject elicits an immune response (cellular or humoral) to itself. In some aspects, the payload molecules are covalently linked to the EV, e.g., exosome, via a maleimide moiety. In other aspects, a payload comprises an adjuvant.

[0147] The terms “pharmaceutically-acceptable carrier,” “pharmaceutically-acceptable excipient,” and grammatical variations thereof, encompass any of the agents approved by a regulatory agency of the U.S. Federal government or listed in the U.S. Pharmacopeia for use in animals, including humans, as well as any carrier or diluent that does not cause the production of undesirable physiological effects to a degree that prohibits administration of the composition to a subject and does not abrogate the biological activity and properties of the administered compound. Included are excipients and carriers that are useful in preparing a pharmaceutical composition and are generally safe, non-toxic, and desirable.

[0148] As used herein, the term “pharmaceutical composition” refers to one or more of the compounds described herein, such as, e.g., an EV, such as exosome of the present disclosure, mixed or intermingled with, or suspended in one or more other chemical components, such as pharmaceutically-acceptable carriers and excipients. One purpose of a pharmaceutical composition is to facilitate administration of preparations of EVs, e.g., exosomes, to a subject.

[0149] The term “polynucleotide” as used herein refers to polymers of nucleotides of any length, including ribonucleotides, deoxyribonucleotides, analogs thereof, or mixtures thereof. This term refers to the primary structure of the molecule. Thus, the term includes triple-, double- and single-stranded deoxyribonucleic acid (“DNA”), as well as triple-, double- and single-stranded ribonucleic acid (“RNA”). It also includes modified, for example by alkylation, and/or by capping, and unmodified forms of the polynucleotide. More particularly, the term “polynucleotide” includes polydeoxyribonucleotides (containing 2-deoxy-D-ribose), polyribonucleotides (containing D-ribose), including tRNA, rRNA, hRNA, siRNA and mRNA, whether spliced or unspliced, any other type of polynucleotide which is an N- or C-glycoside of a purine or pyrimidine base, and other polymers containing normucleotidic backbones, for example, polyamide (e.g., peptide nucleic acids “PNAs”) and polymorpholino polymers, and other synthetic sequence-specific nucleic acid polymers providing that the polymers contain nucleobases in a configuration which allows for base pairing and base stacking, such as is found in DNA and RNA. In some aspects of the present disclosure, the biologically active molecule attached to the EV, e.g., exosome, via a maleimide moiety is a polynucleotide, e.g., an antisense oligonucleotide. In particular aspects, the polynucleotide comprises an mRNA. In other aspect, the mRNA is a synthetic mRNA. In some aspects, the synthetic mRNA comprises at least one unnatural nucleobase. In some aspects, all nucleobases of a certain class have been replaced with unnatural nucleobases (e.g., all uridines in a polynucleotide disclosed herein can be replaced with an unnatural nucleobase, e.g., 5-methoxyuridine). In some aspects of the present disclosure, the biologically active molecule is a polynucleotide.

[0150] The terms “polypeptide,” “peptide,” and “protein” are used interchangeably herein to refer to polymers of amino acids of any length. The polymer can comprise modified amino acids. The terms also encompass an amino acid polymer that has been modified naturally or by intervention; for example, disulfide bond formation, glycosylation, lipidation, acetylation, phosphorylation, or any other manipulation or modification, such as conjugation with a labeling component. Also included within the definition are, for example, polypeptides containing one or more analogs of an amino acid (including, for example, unnatural amino acids such as homocysteine, ornithine, p-acetylphenylalanine, D-amino acids, and creatine), as well as other modifications known in the art. In some aspects of the present disclosure, the biologically active molecule attached to the EV, e.g., exosome, via a maleimide moiety is a polypeptide, e.g., an antibody or a derivative thereof such as an ADC, a PROTAC, a toxin, a fusion protein, or an enzyme.

[0151] The term “polypeptide,” as used herein, refers to proteins, polypeptides, and peptides of any size, structure, or function. Polypeptides include gene products, naturally occurring polypeptides, synthetic polypeptides, homologs, orthologs, paralogs, fragments and other equivalents, variants, and analogs of the foregoing. A polypeptide can be a single polypeptide or can be a multi-molecular complex such as a dimer, trimer or tetramer. They can also comprise single chain or multichain polypeptides. Most commonly disulfide linkages are found in multichain polypeptides. The term polypeptide can also apply to amino acid polymers in which one or more amino acid residues are an artificial chemical analogue of a corresponding naturally occurring amino acid. In some aspects, a “peptide” can be less than or equal to 50 amino acids long, e.g., about 5, 10, 15, 20, 25, 30, 35, 40, 45, or 50 amino acids long.

[0152] The terms “prevent,” “preventing,” and variants thereof as used herein, refer partially or completely delaying onset of an disease, disorder and/or condition; partially or completely delaying onset of one or more symptoms, features, or clinical manifestations of a particular disease, disorder, and/or condition; partially or completely delaying onset of one or more symptoms, features, or manifestations of a particular disease, disorder, and/or condition; partially or completely delaying progression from a particular disease, disorder and/or condition; and/or decreasing the risk of developing pathology associated with the disease, disorder, and/or condition. In some aspects, preventing an outcome is achieved through prophylactic treatment.

[0153] As used herein, the term “producer cell” refers to a cell used for generating an EV, e.g., exosome. A producer cell can be a cell cultured in vitro, or a cell in vivo. A producer cell includes, but not limited to, a cell known to be effective in generating EVs, e.g., exosomes, e.g., HEK293 cells, Chinese hamster ovary (CHO) cells, mesenchymal stem cells (MSCs), BJ human foreskin fibroblast cells, fHDF fibroblast cells, AGE.HN® neuronal precursor cells, CAP® amniocyte cells, adipose mesenchymal stem cells, RPTEC/TERT1 cells. In certain aspects, a producer cell is not an antigen-presenting cell. In some aspects, a producer cell is not a dendritic cell, a B cell, a mast cell, a macrophage, a neutrophil, Kupffer-Browicz cell, cell derived from any of these cells, or any combination thereof.

[0154] As used herein, “prophylactic” refers to a therapeutic or course of action used to prevent the onset of a disease or condition, or to prevent or delay a symptom associated with a disease or condition.

[0155] As used herein, a “prophylaxis” refers to a measure taken to maintain health and prevent or delay the onset of a bleeding episode, or to prevent or delay symptoms associated with a disease or condition.

[0156] A “recombinant” polypeptide or protein refers to a polypeptide or protein produced via recombinant DNA technology. Recombinantly produced polypeptides and proteins expressed in engineered host cells are considered isolated for the purpose of the disclosure, as are native or recombinant polypeptides which have been separated, fractionated, or partially or substantially purified by any suitable technique. The polypeptides disclosed herein can be recombinantly produced using methods known in the art. Alternatively, the proteins and peptides disclosed herein can be chemically synthesized. In some aspects of the present disclosure, the Scaffold X and/or Scaffold Y proteins present in EVs, e.g., exosomes, are recombinantly produced by overexpressing the scaffold proteins in the producer cells, so that levels of scaffold proteins in the resulting EVs, e.g., exosomes are significantly increased with respect to the levels of scaffold proteins present in EVs, e.g., exosomes, of producer cells not overexpressing such scaffold proteins.

[0157] As used herein, the term “scaffold moiety” refers to a molecule, e.g., a protein such as Scaffold X or Scaffold Y, that can be used to anchor a payload, e.g., a biologically active molecule, to the EV, e.g., exosome, either on the luminal surface or on the external surface of the EV, e.g., exosome. In certain aspects, a scaffold moiety comprises a synthetic molecule. In some aspects, a scaffold moiety comprises a non-polypeptide moiety. In other aspects, a scaffold moiety comprises, e.g., a lipid, carbohydrate, protein, or combination thereof (e.g., a glycoprotein or a proteolipid) that naturally exists in the EV, e.g., exosome. In some aspects, a scaffold moiety comprises a lipid, carbohydrate, or protein that does not naturally exist in the EV, e.g., exosome. In some aspects, a scaffold moiety comprises a lipid or carbohydrate which naturally exists in the EV, e.g., exosome, but has been enriched in the EV, e.g., exosome with respect to basal/native/wild type levels. In some aspects, a scaffold moiety comprises a protein which naturally exists in the EV, e.g., exosome but has been enriched in the EV, e.g., exosome, for example, by recombinant overexpression in the producer cell, with respect to basal/native/wild type levels. In certain aspects, a scaffold moiety is Scaffold X. In some aspects, a scaffold moiety is Scaffold Y. In further aspects, a scaffold moiety comprises both Scaffold X and Scaffold Y.

[0158] As used herein, the term “Scaffold X” refers to EV, e.g., exosome, proteins that have been identified on the surface of EVs, e.g., exosomes. See, e.g., U.S. Pat. No. 10,195,290, which is incorporated herein by reference in its entirety. Non-limiting examples of Scaffold X proteins include: prostaglandin F2 receptor negative regulator (“PTGFRN”); basigin (“BSG”); immunoglobulin superfamily member 2 (“IGSF2”); immunoglobulin superfamily member 3 (“IGSF3”); immunoglobulin superfamily member 8 (“IGSF8”); integrin beta-1 (“ITGB1”); integrin alpha-4 (“ITGA4”); 4F2 cell-surface antigen heavy chain (“SLC3A2”); and a class of ATP transporter proteins (“ATP1A1,” “ATP1A2,” “ATP1A3,” “ATP1A4,” “ATP1B3,” “ATP2B1,” “ATP2B2,” “ATP2B3,” “ATP2B”). In some aspects, a Scaffold X protein can be a whole protein or a fragment thereof (e.g., functional fragment, e.g., the smallest fragment that is capable of anchoring another moiety on the external surface or on the luminal surface of the EV, e.g., exosome). In some aspects, a Scaffold X can anchor a biologically active molecule to the external surface or the lumen of the EV, e.g. an exosome. In some aspects of the present disclosure, a biologically active molecule can be covalently attached to a Scaffold X via a maleimide moiety. In some aspects, the biologically active molecule can be attached to Scaffold X via a maleimide moiety on the luminal surface of the EV, e.g., exosome. Non-limiting examples of other scaffold moieties that can be used with the present disclosure include: aminopeptidase N (CD13); Neprilysin, AKA membrane metalloendopeptidase (MME); ectonucleotide pyrophosphatase/phosphodiesterase family member 1 (ENPP1); Neuropilin-1 (NRP1); CD9, CD63, CD81, PDGFR, GPI anchor proteins, lactadherin, LAMP2, and LAMP2B.

[0159] As used herein, the term “Scaffold Y” refers to EV, e.g., exosome, proteins that have been identified within the lumen of EV, e.g., exosomes. See, e.g., International Appl. No. PCT/US2018/061679, which is incorporated herein by reference in its entirety. Non-limiting examples of Scaffold Y proteins include: myristoylated alanine rich Protein Kinase C substrate (“MARCKS”); myristoylated alanine rich Protein Kinase C substrate like 1 (“MARCKSL1”); and brain acid soluble protein 1 (“BASP1”). In some aspects, a Scaffold Y protein can be a whole protein or a fragment thereof (e.g., functional fragment, e.g., the smallest fragment that is capable of anchoring a moiety on the luminal surface of the EV, e.g., exosome). In some aspects, a Scaffold Y can anchor a moiety to the luminal surface of the EV, e.g., exosome. In some aspects of the present disclosure, a moiety can be covalently attached to a Scaffold Y. In some aspects, the moiety can be attached to Scaffold Y on the luminal surface of the EV, e.g., exosome.

[0160] The term “self-immolative spacer” as used herein refers to a spacer as defined below that will spontaneously separate from the second moiety (e.g., a biologically active molecule) if its bond to the first moiety (e.g., a cleavable linker) is cleaved.

[0161] As used herein, the term “similarity” refers to the overall relatedness between polymeric molecules, e.g. between polynucleotide molecules (e.g. DNA molecules and/or RNA molecules) and/or between polypeptide molecules. Calculation of percent similarity of polymeric molecules to one another can be performed in the same manner as a calculation of percent identity, except that calculation of percent similarity takes into account conservative substitutions as is understood in the art. It is understood that percentage of similarity is contingent on the comparison scale used, i.e., whether the amino acids are compared, e.g., according to their evolutionary proximity, charge, volume, flexibility, polarity, hydrophobicity, aromaticity, isoelectric point, antigenicity, or combinations thereof.

[0162] The term “spacer” as used herein refers to a bifunctional chemical moiety which is capable of covalently linking together two spaced moieties (e.g., a cleavable linker and a biologically active molecule) into a normally stable dipartate molecule.

[0163] Unless otherwise indicated, reference to a compound that has one or more stereocenters intends each stereoisomer, and all combinations of stereoisomers, thereof.

[0164] The terms “subject,” “patient,” “individual,” and “host,” and variants thereof are used interchangeably herein and refer to any mammalian subject, including without limitation, humans, domestic animals (e.g., dogs, cats and the like), farm animals (e.g., cows, sheep, pigs, horses and the like), and laboratory animals (e.g., monkey, rats, mice, rabbits, guinea pigs and the like) for whom diagnosis, treatment, or therapy is desired, particularly humans. The methods described herein are applicable to both human therapy and veterinary applications.

[0165] As used herein, the term “substantially free” means that the sample comprising EVs, e.g., exosomes, comprises less than 10% of macromolecules, e.g., contaminants, by mass/volume (m/v) percentage concentration. Some fractions may contain less than 0.001%, less than 0.01%, less than 0.05%, less than 0.1%, less than 0.2%, less than 0.3%, less than 0.4%, less than 0.5%, less than 0.6%, less than 0.7%, less than 0.8%, less than 0.9%, less than 1%, less than 2%, less than 3%, less than 4%, less than 5%, less than 6%, less than 7%, less than 8%, less than 9%, or less than 10% (m/v) of macromolecules.

[0166] As used herein the term “surface-engineered EV” (e.g., Scaffold X-engineered exosome) refers to an EV with the membrane or the surface of the EV modified in its composition so that the surface of the engineered EV is different from that of the EV prior to the modification or of the naturally occurring EV.

[0167] As used herein the term “surface-engineered exosome” (e.g., Scaffold X-engineered exosome) refers to an exosome with the membrane or the surface of the exosome (external surface or luminal surface) modified in its composition so that the surface of the engineered exosome is different from that of the exosome prior to the modification or of the naturally occurring exosome.

[0168] The engineering can be on the surface of the EV, e.g., exosome or in the membrane of the EV, e.g., exosome, so that the surface of the EV, e.g., exosome is changed. For example, the membrane can be modified in its composition of, e.g., a protein, a lipid, a small molecule, a carbohydrate, or a combination thereof. The composition can be changed by a chemical, a physical, or a biological method or by being produced from a cell previously or concurrently modified by a chemical, a physical, or a biological method. Specifically, the composition can be changed by a genetic engineering or by being produced from a cell previously modified by genetic engineering. In some aspects, a surface-engineered EV, e.g., exosome, comprises an exogenous protein (i.e., a protein that the EV, e.g., exosome, does not naturally express) or a fragment or variant thereof that can be exposed to the surface of the EV, e.g., exosome or can be an anchoring point (attachment) for a moiety exposed on the surface of the EV, e.g., exosome. In other aspects, a surface-engineered EV, e.g., exosome comprises a higher expression (e.g., higher number) of a natural EV, e.g., exosome protein (e.g., Scaffold X) or a fragment or variant thereof that can be exposed to the surface of the EV, e.g., exosome or can be an anchoring point (attachment) for a moiety exposed on the surface of the EV, e.g., exosome. In a specific aspect, a surface-engineered EV, e.g., exosome, comprises the modification of one or more membrane components, e.g., a protein such as Scaffold X, a lipid, a small molecule, a carbohydrate, or a combination thereof, wherein at least one of the components is covalently attached to a biologically active molecule via a maleimide moiety.

[0169] As used herein the term “therapeutically effective amount” is the amount of reagent or pharmaceutical compound comprising an EV or exosome of the present disclosure that is sufficient to a produce a desired therapeutic effect, pharmacologic and/or physiologic effect on a subject in need thereof. A therapeutically effective amount can be a “prophylactically effective amount” as prophylaxis can be considered therapy.

[0170] The terms “treat,” “treatment,” or “treating,” as used herein refers to, e.g., the reduction in severity of a disease or condition; the reduction in the duration of a disease course; the amelioration or elimination of one or more symptoms associated with a disease or condition; the provision of beneficial effects to a subject with a disease or condition, without necessarily curing the disease or condition. The term also include prophylaxis or prevention of a disease or condition or its symptoms thereof. In one aspect, the term “treating” or “treatment” means inducing an immune response in a subject against an antigen.

[0171] As used herein, the term “variant” of a molecule (e.g., functional molecule, antigen, or Scaffold X and/or Scaffold Y) refers to a molecule that shares certain structural and functional identities with another molecule upon comparison by a method known in the art. For example, a variant of a protein can include a substitution, insertion, deletion, frame shift or rearrangement in another protein.

[0172] In some aspects, a variant of a Scaffold X or derivative comprises a Scaffold X variant having at least about 70% identity to the full-length, mature PTGFRN, BSG, IGSF2, IGSF3, IGSF8, ITGB1, ITGA4, SLC3A2, or ATP transporter proteins or a fragment (e.g., functional fragment) of the PTGFRN, BSG, IGSF2, IGSF3, IGSF8, ITGB1, ITGA4, SLC3A2, or ATP transporter proteins.

[0173] In some aspects, the variant or variant of a fragment of Scaffold X protein disclosed herein, or derivatives thereof, retains the ability to be specifically targeted to EVs, e.g., exosomes. In some aspects, the Scaffold X or Scaffold X derivative includes one or more mutations, for example, conservative amino acid substitutions.

[0174] In some aspects, a variant of a Scaffold Y or derivative thereof comprises a variant having at least 70% identity to MARCKS, MARCKSL1, BASP1 or a fragment of MARCKS, MARCKSL1, or BASP1.

[0175] In some aspects, the variant or variant of a fragment of Scaffold Y protein, or derivatives thereof, retains the ability to be specifically targeted to the luminal surface of EVs, e.g., exosomes. In some aspects, the Scaffold Y includes one or more mutations, e.g., conservative amino acid substitutions.

[0176] Naturally occurring variants are called “allelic variants,” and refer to one of several alternate forms of a gene occupying a given locus on a chromosome of an organism (Genes II, Lewin, B., ed., John Wiley & Sons, New York (1985)). These allelic variants can vary at either the polynucleotide and/or polypeptide level and are included in the present disclosure. Alternatively, non-naturally occurring variants can be produced by mutagenesis techniques or by direct synthesis.

[0177] Using known methods of protein engineering and recombinant DNA technology, variants can be generated to improve or alter the characteristics of the polypeptides. For instance, one or more amino acids can be deleted from the N-terminus or C-terminus of the secreted protein without substantial loss of biological function. Ron et al., J. Biol. Chem. 268: 2984-2988 (1993), incorporated herein by reference in its entirety, reported variant KGF proteins having heparin binding activity even after deleting 3, 8, or 27 amino-terminal amino acid residues. Similarly, interferon gamma exhibited up to ten times higher activity after deleting 8-10 amino acid residues from the carboxy terminus of this protein. (Dobeli et al., J. Biotechnology 7:199-216 (1988), incorporated herein by reference in its entirety.)

[0178] Moreover, ample evidence demonstrates that variants often retain a biological activity similar to that of the naturally occurring protein. For example, Gayle and coworkers (J. Biol. Chem 268:22105-22111 (1993), incorporated herein by reference in its entirety) conducted extensive mutational analysis of human cytokine IL-1a. They used random mutagenesis to generate over 3,500 individual IL-1a mutants that averaged 2.5 amino acid changes per variant over the entire length of the molecule. Multiple mutations were examined at every possible amino acid position. The investigators found that “[m]ost of the molecule could be altered with little effect on either [binding or biological activity].” (See Abstract.) In fact, only 23 unique amino acid sequences, out of more than 3,500 nucleotide sequences examined, produced a protein that significantly differed in activity from wild-type.

[0179] As stated above, variants or derivatives include, e.g., modified polypeptides. In some aspects, variants or derivatives of, e.g., polypeptides, polynucleotides, lipids, glycoproteins, are the result of chemical modification and/or endogenous modification. In some aspects, variants or derivatives are the result of in vivo modification. In some aspects, variants or derivatives are the result of in vitro modification. In yet other aspects, variant or derivatives are the result of intracellular modification in producer cells.

[0180] Modifications present in variants and derivatives include, e.g., acetylation, acylation, ADP-ribosylation, amidation, covalent attachment of flavin, covalent attachment of a heme moiety, covalent attachment of a nucleotide or nucleotide derivative, covalent attachment of a lipid or lipid derivative, covalent attachment of phosphotidylinositol, cross-linking, cyclization, disulfide bond formation, demethylation, formation of covalent cross-links, formation of cysteine, formation of pyroglutamate, formylation, gamma-carboxylation, glycosylation, GPI anchor formation, hydroxylation, iodination, methylation, myristoylation, oxidation, pegylation (Mei et al., Blood 116:270-79 (2010), which is incorporated herein by reference in its entirety), proteolytic processing, phosphorylation, prenylation, racemization, selenoylation, sulfation, transfer-RNA mediated addition of amino acids to proteins such as arginylation, and ubiquitination.

[0181] In some aspects, Scaffold X and/or Scaffold Y can modified at any convenient location. In some aspects, a biologically active molecule can be modified at any convenient location. In particular aspects of the present disclosure, an EV, e.g., exosome, component (e.g., a protein such as Scaffold X and/or Scaffold Y, a lipid, or a glycan) and/or a biologically active molecule (e.g., an antibody or ADC, a PROTAC, a small molecule such as a cyclic dinucleotide, a toxin such as MMAE, a STING agonist, a tolerizing agent, or an antisense oligonucleotide) can be modified to yield a derivative comprising at least one maleimide moiety.

### II. Conjugated EVs (e.g., Exosomes) of the Disclosure

[0182] Extracellular vesicles (EVs) typically have 20 nm to 1000 nm in diameter; e.g., exosomes, which are small extracellular vesicles, have typically 100-200 nm in diameter. EVs, e.g., exosomes, are composed of a limiting lipid bilayer and a diverse set of proteins and nucleic acids (Maas, S. L. N., et al., Trends. Cell Biol. 27(3):172-188 (2017)). EVs, e.g., exosomes, exhibit preferential uptake in discrete cell types and tissues, and their tropism can be directed by adding proteins to their surface that interact with receptors on the surface of target cells (Alvarez-Erviti, L., et al., Nat. Biotechnol. 29(4):341-345 (2011)).

[0183] Unlike antibodies, EVs (e.g., exosomes) can accommodate large numbers of molecules attached to their surface, on the order of thousands to tens of thousands of molecules per EV (e.g., exosome). EV (e.g., exosome)-drug conjugates thus represent a platform to deliver a high concentration of therapeutic compound to discrete cell types, while at the same time limiting overall systemic exposure to the compound, which in turn reduces off-target toxicity.

[0184] In some aspects, the present disclosure provides a “modified biologically active molecules” (MBAM), e.g., an ASO, comprising a “biologically active molecule” (BAM), e.g., an ASO, modified by binding, e.g., covalently, one or more anchoring moieties to the BAM, e.g., an ASO, either directly or indirectly, e.g., via one or more linker combinations. A modified BAM disclosed here can comprise a “anchoring moiety” (AM) and optionally one or more linkers (“linker combination”) which connect the AM to the BAM as schematically represented below

[AM]-[Linker]n-[BAM]

wherein n is an integer between 0 and 10.

[0185] The BAM can be attached to an anchoring moiety or linker combination via reaction between a “reactive group” (RG; e.g., amine, thiol, hydroxy, carboxylic acid, or azide) with a “reactive moiety” (RM; e.g., maleimide, succinate, NHS). Several potential synthetic routes are envisioned, for example.

[AM]-/Reactive moiety/+/Reactive group/-[BAM]

[AM]-[Linker]n-/Reactive moiety/+/Reactive group/-[BAM]

[AM]-/Reactive moiety/+/Reactive group/-[Linker]n-[BAM]

[AM]-[Linker]n-/Reactive moiety/+/Reactive group/-[Linker]n-[BAM]

[0186] The anchoring moiety can insert into the lipid bilayer of an EV, e.g., an exosome, allowing the loading of the exosome with a BAM, e.g., an ASO. Currently, a predominant obstacle to the commercialization of exosomes as a delivery vehicle for polar BAMs, e.g., ASOs, is highly inefficient loading. This obstacle can be overcome by modifying BAMs, e.g., ASOs, prior to loading them into exosomes. Thus, as described herein, modification of BAMs, e.g., ASOs, facilitates their loading into exosomes.

[0187] The methods of loading exosomes with modified BAMs, e.g., ASOs, set forth herein significantly improve loading efficiency as compared to the loading efficiency previously reported for introducing unmodified BAMs into exosomes by, for example, electroporation or cationic lipid transfection.

[0188] In some aspects, the modifications increase the hydrophobicity of the BAM, e.g., an ASO, by at least about 1, at least about 2, at least about 3, at least about 4, at least about 5, at least about 6, at least about 7, at least about 8, at least about 9, or at least about 10 fold relative to native (non-modified) BAM, e.g., the corresponding unmodified ASO. In some aspects, the modifications increase the hydrophobicity of the BAM, e.g., an ASO, by at least about 1, at least about 2, at least about 3, at least about 4, at least about 5, at least about 6, at least about 7, at least about 8, at least about 9, or at least about 10 orders of magnitude relative to native (non-modified) BAM, e.g., the corresponding unmodified ASO.

[0189] In some aspects, the modifications increase the hydrophobicity of the BAM, e.g., an ASO, by at least about 10%, at least about 20%, at least about 30%, at least about 40%, at least about 50%, at least about 60%, at least about 70%, at least about 80%, at least about 90%, at least about 100%, at least about 125%, at least about 150%, at least about 175%, at least about 200%, at least about 250%, at least about 300%, at least about 350%, at least about 400%, at least about 450%, at least about 500%, at least about 600%, at least about 700%, at least about 800%, at least about 900%, or at least about 1000% relative to native (non-modified) BAM, e.g., the corresponding unmodified ASO. Increases in hydrophobicity can be assessed using any suitable method. For example, hydrophobicity can be determined by measuring the percentage solubility in an organic solvent, such as octanol, as compared to solubility in an aqueous solvent, such as water.

[0190] In some aspect, an anchoring moiety can be chemically conjugated to a BAM, e.g., an ASO, to enhance its hydrophobic character. In exemplary aspects, the anchoring moiety is a sterol (e.g., cholesterol), GM1, a lipid, a vitamin, a small molecule, a peptide, or a combination thereof. In some aspects, the moiety is a lipid. In some aspects, the anchoring moiety is a sterol, e.g., cholesterol. Additional moieties include, for example, phospholipids, lysophospholipids, fatty acids, or vitamins (e.g., vitamin D or vitamin E).

[0191] In some aspects, the anchoring moiety is conjugated at the termini of the BAM, e.g., an ASO, either directly or via one or more linkers (i.e., “terminal modification”). In other aspects, the anchoring moiety is conjugated to other portions of BM, e.g., an ASO.

[0192] In some aspects, the ASO comprises a contiguous nucleotide sequence of from about 10 to about 30, such as 10-20, 14-20, 16-20, or 15-25, nucleotides in length. In certain aspects, the ASO is 20 nucleotides in length. In certain aspects, the ASO is 18 nucleotides in length. In certain aspects, the ASO is 19 nucleotides in length. In certain aspects, the ASO is 17 nucleotides in length. In certain aspects, the ASO is 16 nucleotides in length. In certain aspects, the ASO is 15 nucleotides in length. In certain aspects, the ASO is 14 nucleotides in length. In certain aspects, the ASO is 13 nucleotides in length. In certain aspects, the ASO is 12 nucleotides in length. In certain aspects, the ASO is 11 nucleotides in length. In certain aspects, the ASO is 10 nucleotides in length.

[0193] In some aspects, the ASO comprises a contiguous nucleotide sequence of from about 10 to about 50 nucleotides in length, e.g., about 10 to about 45, about 10 to about 40, about 10 or about 35, or about 10 to about 30. In certain aspects, the ASO is 21 nucleotides in length. In certain aspects, the ASO is 22 nucleotides in length. In certain aspects, the ASO is 23 nucleotides in length. In certain aspects, the ASO is 24 nucleotides in length. In certain aspects, the ASO is 25 nucleotides in length. In certain aspects, the ASO is 26 nucleotides in length. In certain aspects, the ASO is 27 nucleotides in length. In certain aspects, the ASO is 28 nucleotides in length. In certain aspects, the ASO is 29 nucleotides in length. In certain aspects, the ASO is 30 nucleotides in length. In certain aspects, the ASO is 31 nucleotides in length. In certain aspects, the ASO is 32 nucleotides in length. In certain aspects, the ASO is 33 nucleotides in length. In certain aspects, the ASO is 34 nucleotides in length. In certain aspects, the ASO is 35 nucleotides in length. In certain aspects, the ASO is 36 nucleotides in length. In certain aspects, the ASO is 37 nucleotides in length. In certain aspects, the ASO is 38 nucleotides in length. In certain aspects, the ASO is 39 nucleotides in length. In certain aspects, the ASO is 40 nucleotides in length. In certain aspects, the ASO is 41 nucleotides in length. In certain aspects, the ASO is 42 nucleotides in length. In certain aspects, the ASO is 43 nucleotides in length. In certain aspects, the ASO is 44 nucleotides in length. In certain aspects, the ASO is 45 nucleotides in length. In certain aspects, the ASO is 46 nucleotides in length. In certain aspects, the ASO is 47 nucleotides in length. In certain aspects, the ASO is 48 nucleotides in length. In certain aspects, the ASO is 49 nucleotides in length. In certain aspects, the ASO is 50 nucleotides in length.

[0194] In some aspects, the modified BAM, e.g., an ASO, can include a detectable label. Exemplary labels include fluorescent labels and/or radioactive labels. In some aspects, where modified BAMs, e.g., ASOs, are fluorescently labeled, the detectable label can be, for example, Cy3. Adding a detectable label to modified BAMs, e.g., ASOs, can be used as a way of labeling exosomes, and following their biodistribution. In other aspects, a detectable label can be attached to exosomes directly, for example, by way of labeling an exosomal lipid and/or an exosomal peptide.

[0195] The different components of a modified BAM (i.e., anchoring moieties, linkers and linker combinations, and BAMs such as ASOs) can be linked by amide, ester, ether, thioether, disulfide, phosphoramidate, phosphotriester, phosphorodithioate, methyl phosphonate, phosphodiester, or phosphorothioate linkages or, alternatively any or other linkage.

[0196] In some aspects, the different components of a modified BAM, can be linker using bifunctional linkers (i.e., linkers containing two functional groups), such as N-succinimidyl-3-(2-pyridyldithio)propionate, N-4-maleimiide butyric acid, S-(2-pyridyldithio)cysteamine, iodoacetoxysuccinimide, N-(4-maleimidebutyloxy) succinimide, N-[5-(3-maleimide propylamide)-1-carboxypentyl]iminodiacetic acid, N-(5-aminopentyl)-iminodiacetic acid, and the like.

[0197] II.A. Anchoring Moieties

[0198] Suitable anchoring moieties capable of anchoring a BAM to the surface of an EV, e.g., an exosome, comprise for example sterols (e.g., cholesterol), lipids, lysophospholipids, fatty acids, or fat-soluble vitamins, as described in detail below.

[0199] In some aspects, the anchoring moiety can be a lipid. A lipid anchoring moiety can be any lipid known in the art, e.g., palmitic acid or glycosylphosphatidylinositols. In some aspects, the lipid, is a fatty acid, phosphatide, phospholipid (e.g., phosphatidyl choline, phosphatidyl serine, or phosphatidyl ethanolamine), or analogue thereof (e.g. phophatidylcholine, lecithin, phosphatidylethanolamine, cephalin, or phosphatidylserine or analogue or portion thereof, such as a partially hydrolyzed portion thereof).

[0200] Generally, anchoring moieties are chemically attached. However, an anchoring moiety can be attached to a BAM enzymatically. In some aspects, in the possible to attach an anchoring moiety to a BAM via modification of cell culture conditions. For example, by using a culture medium where myristic acid is limiting, some other fatty acids including shorter-chain and unsaturated, can be attached to an N-terminal glycine. For example, in BK channels, myristate has been reported to be attached posttranslationally to internal serine/threonine or tyrosine residues via a hydroxyester linkage.

[0201] The anchoring moiety can be conjugated to a BAM directly or indirectly via a linker combination, at any chemically feasible location, e.g., at the 5′ and/or 3′ end of a nucleotide sequence, e.g., an ASO. In one aspect, the anchoring moiety is conjugated only to the 3′ end of the BAM. In one aspect, the anchoring moiety is conjugated only to the 5′ end of a nucleotide sequence, e.g., an ASO. In one aspect, the anchoring moiety is conjugated at a location which is not the 3′ end or 5′ end of a nucleotide sequence, e.g., an ASO.

[0202] Some types of membrane anchors that can be used to practice the methods of the present disclosure presented in the following table:

| Modification | Modifying Group |
|---|---|
| S-Palmitoylation | [chemical structure] |
| N-Palmitoylation | [chemical structure] |
| N-Myristoylation | [chemical structure] |
| O-Acylation | [chemical structure] |
| Farnesylation | [chemical structure] |
| Geranylgeranylation | [chemical structure] |
| Cholesterol | [chemical structure] |

[0203] In some aspects, an anchoring moiety of the present disclosure can comprise two or more types of anchoring moieties disclosed herein. For example, in some aspects, an anchoring moiety can comprise two lipids, e.g., a phospholipids and a fatty acid, or two phospholipids, or two fatty acids, or a lipid and a vitamin, or cholesterol and a vitamin, etc. which taken together have 6-80 carbon atoms (i.e., an equivalent carbon number (ECN) of 6-80).

[0204] In some aspects, the combination of anchoring moieties, e.g., a combination of the lipids (e.g., fatty acids) has an ECN of 6-80, 8-80, 10-80, 12-80, 14-80, 16-80, 18-80, 20-80, 22-80, 24-80, 26-80, 28-80, 30-80, 4-76, 6-76, 8-76, 10-76, 12-76, 14-76, 16-76, 18-76, 20-76, 22-76, 24-76, 26-76, 28-76, 30-76, 6-72, 8-72, 10-72, 12-72, 14-72, 16-72, 18-72, 20-72, 22-72, 24-72, 26-72, 28-72, 30-72, 6-68, 8-68, 10-68, 12-68, 14-68, 16-68, 18-68, 20-68, 22-68, 24-68, 26-68, 28-68, 30-68, 6-64, 8-64, 10-64, 12-64, 14-64, 16-64, 18-64, 20-64, 22-64, 24-64, 26-64, 28-64, 30-64, 6-60, 8-60, 10-60, 12-56, 14-56, 16-56, 18-56, 20-56, 22-56, 24-56, 26-56, 28-56, 30-56, 6-52, 8-52, 10-52, 12-52, 14-52, 16-52, 18-52, 20-52, 22-52, 24-52, 26-52, 28-52, 30-52, 6-48, 8-48, 10-48, 12-48, 14-48, 16-48, 18-48, 20-48, 22-48, 24-48, 26-48, 28-48, 30-48, 6-44, 8-44, 10-44, 12-44, 14-44, 16-44, 18-44, 20-44, 22-44, 24-44, 26-44, 28-44, 30-44, 6-40, 8-40, 10-40, 12-40, 14-40, 16-40, 18-40, 20-40, 22-40, 24-40, 26-40, 28-40, 30-40, 6-36, 8-36, 10-36, 12-36, 14-36, 16-36, 18-36, 20-36, 22-36, 24-36, 26-36, 28-36, 30-36, 6-32, 8-32, 10-32, 12-32, 14-32, 16-32, 18-32, 20-32, 22-32, 24-32, 26-32, 28-32, or 30-32.

[0205] II.A.1 Cholesterol and Other Sterols

[0206] In some aspects, the anchoring moiety comprises a sterol, steroid, hopanoid, hydroxysteroid, secosteroid, or analog thereof with lipophilic properties. In some aspects, the anchoring moiety comprises a sterol, such as a phytosterol, mycosterol, or zoosterol. Exemplary zoosterols include cholesterol and 24S-hydroxycholesterol; exemplary phytosterols include ergosterol (mycosterol), campesterol, sitosterol, and stigmasterol. In some aspects, the sterol is selected from ergosterol, 7-dehydrocholesterol, cholesterol, 24S-hydroxycholesterol, lanosterol, cycloartenol, fucosterol, saringosterol, campesterol, β-sitosterol, sitostanol, coprostanol, avenasterol, or stigmasterol. Sterols may be found either as free sterols, acylated (sterol esters), alkylated (steryl alkyl ethers), sulfated (sterol sulfate), or linked to a glycoside moiety (steryl glycosides), which can be itself acylated (acylated sterol glycosides).

[0207] In some aspects, the anchoring moiety comprises a steroid. In some aspects, the steroid is selected from dihydrotestosterone, uvaol, hecigenin, diosgenin, progesterone, or cortisol.

[0208] For example, sterols may be conjugated to the BAM directly or via a linker combination at the available OH group of the sterol. Exemplary sterols have the general skeleton shown below:

[chemical structure]

[0209] As a further example, ergosterol as t e structure below:

[chemical structure]

[0210] Cholesterol has the structure below:

[chemical structure]

[0211] Accordingly, in some aspects, the free OH group of a sterol or steroid is used to conjugate the ASO directly or via a linker combination, to the sterol (e.g., cholesterol) or steroid.

[0212] II.A.2. Fatty Acids

[0213] In some aspects, the anchoring moiety is a fatty acid. In some aspects, the fatty acid is a shortchain, medium-chain, or long-chain fatty acid. In some aspects, the fatty acid is a saturated fatty acid. In some aspects, the fatty acid is an unsaturated fatty acid. In some aspects, the fatty acid is a monounsaturated fatty acid. In some aspects, the fatty acid is a polyunsaturated fatty acid, such as an ω-3 (omega-3) or ω-6 (omega-6) fatty acid.

[0214] In some aspects, the lipid, e.g., fatty acid, has a C₂-C₆₀ chain. In some aspects, the lipid, e.g., fatty acid, has a C₂-C₂₈ chain. In some aspects, the fatty acid, has a C₂-C₄₀ chain. In some aspects, the fatty acid, has a C₂-C₁₂ or C₄-C₁₂ chain. In some aspects, the fatty acid, has a C₄-C₄₀ chain. In some aspects, the fatty acid, has a C₄-C₄₀, C₂-C₃₈, C₂-C₃₆, C₂-C₃₄, C₂-C₃₂, C₂-C₃₀, C₄-C₃₀, C₂-C₂₈, C₄-C₂₈, C₂-C₂₆, C₄-C₂₆, C₂-C₂₄, C₄-C₂₄, C₆-C₂₄, C₈-C₂₄, C₁₀-C₂₄, C₂-C₂₂, C₄-C₂₂, C₆-C₂₂, C₈-C₂₂, C₁₀-C₂₂, C₂-C₂₀, C₄-C₂₀, C₆-C₂₀, C₈-C₂₀, C₁₀-C₂₀, C₂-C₁₈, C₄-C₁₈, C₆-C₁₈, C₈-C₁₈, C₁₀-C₁₈, C₁₂-C₁₈, C₁₄-C₁₈, C₁₆-C₁₈, C₂-C₁₆, C₄-C₁₆, C₆-C₁₆, C₈-C₁₆, C₁₀-C₁₆, C₁₂-C₁₆, C₁₄-C₁₆, C₂-C₁₅, C₄-C₁₅, C₆-C₁₅, C₈-C₁₅, C₉-C₁₅, C₁₀-C₁₅, C₁₁-C₁₅, C₁₂-C₁₅, C₁₃-C₁₅, C₂-C₁₄, C₄-C₁₄, C₆-C₁₄, C₈-C₁₄, C₉-C₁₄, C₁₀-C₁₄, C₁₁-C₁₄, C₁₂-C₁₄, C₂-C₁₃, C₄-C₁₃, C₆-C₁₃, C₇-C₁₃, C₈-C₁₃, C₉-C₁₃, C₁₀-C₁₃, C₁₀-C₁₃, C₁₁-C₁₃, C₂-C₁₃, C₄-C₁₂, C₆-C₁₂, C₇-C₁₂, C₈-C₁₂, C₉-C₁₂, C₁₀-C₁₂, C₂-C₁₁, C₄-C₁₁, C₆-C₁₁, C₇-C₁₁, C₈-C₁₁, C₉-C₁₁, C₂-C₁₀, C₄-C₁₀, C₂-C₉, C₄-C₉, C₂-C₈, C₂-C₇, C₄-C₇, C₂-C₆, or C₄-C₆, chain. In some aspects, the fatty acid, has a C₂, C₃, C₄, C₅, C₆, C₇, C₈, C₉, C₁₀, C₁₁, C₁₂, C₁₃, C₁₄, C₁₅, C₁₆, C₁₇, C₁₈, C₁₉, C₂₀, C₂₁, C₂₂, C₂₃, C₂₄, C₂₅, C₂₆, C₂₇, C₂₈, C₂₉, C₃₀, C₃₁, C₃₂, C₃₃, C₃₄, C₃₅, C₃₆, C₃₇, C₃₈, C₃₉, C₄₀, C₄₁, C₄₂, C₄₃, C₄₄, C₄₅, C₄₆, C₄₇, C₄₈, C₄₉, C₅₀, C₅₁, C₅₂, C₅₃, C₅₄, C₅₅, C₅₆, C₅₇, C₅₈, C₅₉, or C₆₀ chain.

[0215] In some aspects, the anchoring moiety comprises two fatty acids, each of which is independently selected from a fatty acid having a chain with any one of the foregoing ranges or numbers of carbon atoms. In some aspects, one of the fatty acids is independently a fatty acid with a C6-C21 chain and one is independently a fatty acid with a C12-C36 chain. In some aspects, each fatty acid independently has a chain of 11, 12, 13, 14, 15, 16, or 17 carbon atoms.

[0216] Suitable fatty acids include saturated straight-chain fatty acids, saturated branched fatty acids, unsaturated fatty acids, hydroxy fatty acids, and polycarboxylic acids. In some aspects, such fatty acids have up to 32 carbon atoms.

[0217] Examples of useful saturated straight-chain fatty acids include those having an even number of carbon atoms, such as butyric acid, caproic acid, caprylic acid, capric acid, lauric acid, myristic acid, palmitic acid, stearic acid, arachic acid, behenic acid, lignoceric acid, hexacosanoic acid, octacosanoic acid, triacontanoic acid and n-dotriacontanoic acid, and those having an odd number of carbon atoms, such as propionic acid, n-valeric acid, enanthic acid, pelargonic acid, hendecanoic acid, tridecanoic acid, pentadecanoic acid, heptadecanoic acid, nonadecanoic acid, heneicosanoic acid, tricosanoic acid, pentacosanoic acid, and heptacosanoic acid.

[0218] Examples of suitable saturated branched fatty acids include isobutyric acid, isocaproic acid, isocaprylic acid, isocapric acid, isolauric acid, 11-methyldodecanoic acid, isomyristic acid, 13-methyl-tetradecanoic acid, isopalmitic acid, 15-methyl-hexadecanoic acid, isostearic acid, 17-methyloctadecanoic acid, isoarachic acid, 19-methyl-eicosanoic acid, α-ethyl-hexanoic acid, α-hexyldecanoic acid, α-heptylundecanoic acid, 2-decyltetradecanoic acid, 2-undecyltetradecanoic acid, 2-decylpentadecanoic acid, 2-undecylpentadecanoic acid, and Fine oxocol 1800 acid (product of Nissan Chemical Industries, Ltd.). Suitable saturated odd-carbon branched fatty acids include anteiso fatty acids terminating with an isobutyl group, such as 6-methyl-octanoic acid, 8-methyl-decanoic acid, 10-methyl-dodecanoic acid, 12-methyl-tetradecanoic acid, 14-methyl-hexadecanoic acid, 16-methyl-octadecanoic acid, 18-methyl-eicosanoic acid, 20-methyl-docosanoic acid, 22-methyl-tetracosanoic acid, 24-methyl-hexacosanoic acid, and 26-methyloctacosanoic acid.

[0219] Examples of suitable unsaturated fatty acids include 4-decenoic acid, caproleic acid, 4-dodecenoic acid, 5-dodecenoic acid, lauroleic acid, 4-tetradecenoic acid, 5-tetradecenoic acid, 9-tetradecenoic acid, palmitoleic acid, 6-octadecenoic acid, oleic acid, 9-octadecenoic acid, 11-octadecenoic acid, 9-eicosenoic acid, cis-11-eicosenoic acid, cetoleic acid, 13-docosenoic acid, 15-tetracosenoic acid, 17-hexacosenoic acid, 6,9,12,15-hexadecatetraenoic acid, linoleic acid, linolenic acid, α-eleostearic acid, β-eleostearic acid, punicic acid, 6,9,12,15-octadecatetraenoic acid, parinaric acid, 5,8,11,14-eicosatetraenoic acid, 5,8,11,14,17-eicosapentaenoic acid, 7,10,13,16,19-docosapentaenoic acid, 4,7,10,13,16,19-docosahexaenoic acid, and the like.

[0220] Examples of suitable hydroxy fatty acids include α-hydroxylauric acid, α-hydroxymyristic acid, α-hydroxypalmitic acid, α-hydroxystearic acid, ω-hydroxylauric acid, α-hydroxyarachic acid, 9-hydroxy-12-octadecenoic acid, ricinoleic acid, α-hydroxybehenic acid, 9-hydroxy-trans-10,12-octadecadienic acid, kamolenic acid, ipurolic acid, 9,10-dihydroxystearic acid, 12-hydroxystearic acid and the like.

[0221] Examples of suitable polycarboxylic acids include oxalic acid, malonic acid, succinic acid, glutaric acid, adipic acid, pimelic acid, suberic acid, azelaic acid, sebacic acid, D,L-malic acid, and the like.

[0222] In some aspects, each fatty acid is independently selected from propionic acid, butyric acid, valeric acid, caproic acid, enanthic acid, caprylic acid, pelargonic acid, capric acid, undecylic acid, lauric acid, tridecylic acid, myristic acid, pentadecylic acid, palmitic acid, margaric acid, stearic acid, nonadecylic acid, arachidic acid, heneicosylic acid, behenic acid, tricosylic acid, lignoceric acid, pentacosylic acid, cerotic acid, heptacosylic acid, montanic acid, nonacosylic acid, melissic acid, henatriacontylic acid, lacceroic acid, psyllic acid, geddic acid, ceroplastic acid, hexatriacontylic acid, heptatriacontanoic acid, or octatriacontanoic acid.

[0223] In some aspects, each fatty acid is independently selected from r-linolenic acid, stearidonic acid, eicosapentaenoic acid, docosahexaenoic acid, linoleic acid, gamma-linoleic acid, dihomno-gamma-linoleic acid, arachidonic acid, docosatetraenoic acid, palmitoleic acid, vaccenic acid, paullinic acid, oleic acid, elaidic acid, gondoic acid, eurcic acid, nervonic acid, mead acid, adrenic acid, bosseopentaenoic acid, ozubondo acid, sardine acid, herring acid, docosahexaenoic acid, or tetracosanolpentaenoic acid, or another monounsaturated or polyunsaturated fatty acid.

[0224] In some aspects, one or both of the fatty acids is an essential fatty acid. In view of the beneficial health effects of certain essential fatty acids, the therapeutic benefits of disclosed therapeutic-loaded exosomes may be increased by including such fatty acids in the therapeutic agent. In some aspects, the essential fatty acid is an n-6 or n-3 essential fatty acid selected from the group consisting of linolenic acid, gamma-linolenic acid, dihomo-gamma-linolenic acid, arachidonic acid, adrenic acid, docosapentaenoic n-6 acid, alpha-linolenic acid, stearidonic acid, the 20:4n-3 acid, eicosapentaenoic acid, docosapentaenoic n-3 acid, or docosahexaenoic acid.

[0225] In some aspects, each fatty acid is independently selected from all-cis-7,10,13-hexadecatrienoic acid, α-linolenic acid, stearidonic acid, eicosatrienoic acid, eicosatetraenoic acid, eicosapentaenoic acid (EPA), docosapentaenoic acid, docosahexaenoic acid (DHA), tetracosapentaenoic acid, tetracosahexaenoic acid, or lipoic acid. In other aspects, the fatty acid is selected from eicosapentaenoic acid, docosahexaenoic acid, or lipoic acid. Other examples of fatty acids include all-cis-7,10,13-hexadecatrienoic acid, fc-linolenic acid (ALA or all-cis-9,12,15-octadecatrienoic acid), stearidonic acid (SID or all-cis-6,9,12,15-octadecatetraenoic acid), eicosatrienoic acid (ETE or all-cis-11,14,17-eicosatrienoic acid), eicosatetraenoic acid (ETA or all-cis-8,11,14,17-eicosatetraenoic acid), eicosapentaenoic acid (EPA), docosapentaenoic acid (DPA, clupadonic acid or all-cis-7,10,13,16,19-docosapentaenoic acid), docosahexaenoic acid (DHA or all-cis-4,7,10,13,16,19-docosahexaenoic acid), tetracosapentaenoic acid (all-cis-9,12,15,18,21-docosahexaenoic acid), or tetracosahexaenoic acid (nisinic acid or all-cis-6,9,12,15,18,21-tetracosenoic acid). In some aspects, the fatty acid is a medium-chain fatty acid such as lipoic acid.

[0226] Fatty acid chains differ greatly in the length of their chains and may be categorized according to chain length, e.g as short to very long Short-chain fatty acids (SCFA) are fatty acids with chains of about five or less carbons (e.g. butyric acid). In some aspects, the fatty acid is a SCFA Medium-chain fatty acids (MCFA) include fatty acids with chains of about 6-12 carbons, which can form medium-chain triglycerides. In some aspects, the fatty acid is a MCFA. Long-chain fatty acids (LCFA) include fatty acids with chains of 13-21 carbons. In some aspects, the fatty acid is a LCFA. In some aspects, the fatty acid is a LCFA. Very long chain fatty acids (VLCFA) include fatty acids with chains of 22 or more carbons, such as 22-60, 22-50, or 22-40 carbons. In some aspects, the fatty acid is a VLCFA.

[0227] II.A.3. Phospholipids

[0228] In some aspects, the anchoring moiety comprises a phospholipid. Phospholipids are a class of lipids that are a major component of all cell membranes. They can form lipid bilayers because of their amphiphilic characteristic. The structure of the phospholipid molecule generally consists of two hydrophobic fatty acid “tails” and a hydrophilic “head” consisting of a phosphate group. For example, a phospholipid can be a lipid according to the following formula:

[chemical structure]

in which Rₚ represents a phospholipid moiety and R₁ and R₂ represent fatty acid moieties with or without unsaturation that may be the same or different.

[0229] A phospholipid moiety may be selected, for example, from the non-limiting group consisting of phosphatidyl choline, phosphatidyl ethanolamine, phosphatidyl glycerol, phosphatidyl serine, phosphatidic acid, 2 lysophosphatidyl choline, and a sphingomyelin.

[0230] Particular phospholipids may facilitate fusion to a lipid bilayer, e.g., the lipid bilayer of an exosomal membrane. For example, a cationic phospholipid may interact with one or more negatively charged phospholipids of a membrane. Fusion of a phospholipid to a membrane may allow one or more elements of a lipid-containing composition to bind to the membrane or to pass through the membrane.

[0231] A fatty acid moiety may be selected, for example, from the non-limiting group consisting of lauric acid, myristic acid, myristoleic acid, palmitic acid, palmitoleic acid, stearic acid, oleic acid, linoleic acid, alpha-linolenic acid, erucic acid, phytanoic acid, arachidic acid, arachidonic acid, eicosapentaenoic acid, behenic acid, docosapentaenoic acid, and docosahexaenoic acid.

[0232] The phospholipids using as anchoring moieties in the present disclosure can be natural or non-natural phospholipids. Non-natural phospholipid species including natural species with modifications and substitutions including branching, oxidation, cyclization, and alkynes are also contemplated. For example, a phospholipid may be functionalized with or cross-linked to one or more alkynes (e.g., an alkenyl group in which one or more double bonds is replaced with a triple bond). Under appropriate reaction conditions, an alkyne group may undergo a copper-catalyzed cycloaddition upon exposure to an azide.

[0233] Phospholipids include, but are not limited to, glycerophospholipids such as phosphatidylcholines, phosphatidylethanolamines, phosphatidylserines, phosphatidylinositols, phosphatidyl glycerols, and phosphatidic acids. Examples of phospholipids that can be used in the anchoring moieties disclosed herein include phosphatidylethanolamines (e.g., dilauroylphosphatidyl ethanolamine, dimyristoylphosphatidyl ethanolamine, dipalmitoylphosphatidyl ethanolamine, distearoylphosphatidyl ethanolamine, dioleoylphosphatidyl ethanolamine, 1-palmitoyl-2-oleylphosphatidyl ethanolamine, 1-oleyl-2-palmitoylphosphatidyl ethanolamine, and dierucoylphosphatidyl ethanolamine), phosphatidyl glycerols (e.g., dilauroylphosphatidyl glycerol, dimyristoylphosphatidyl glycerol, dipalmitoylphosphatidyl glycerol, distearoylphosphatidyl glycerol, dioleoylphosphatidyl glycerol, 1-palmitoyl-2-oleyl-phosphatidyl glycerol, 1-oleyl-2-palmitoyl-phosphatidyl glycerol, and dierucoylphosphatidyl glycerol); phosphatidyl serines (e.g., such as dilauroylphosphatidyl serine, dimyristoylphosphatidyl serine, dipalmitoylphosphatidyl serine, distearoylphosphatidyl serine, dioleoylphosphatidyl serine, 1-palmitoyl-2-oleyl-phosphatidyl serine, 1-oleyl-2-palmitoyl-phosphatidyl serine, and dierucoylphosphatidyl serine); phosphatidic acids (e.g., dilauroylphosphatidic acid, dimyristoylphosphatidic acid, dipalmitoylphosphatidic acid, distearoylphosphatidic acid, dioleoylphosphatidic acid, 1-palmitoyl-2-oleylphosphatidic acid, 1-oleyl-2-palmitoyl-phosphatidic acid, and dierucoylphosphatidic acid); and phosphatidyl inositols (e.g., dilauroylphosphatidyl inositol, dimyristoylphosphatidyl inositol, dipalmitoylphosphatidyl inositol, distearoylphosphatidyl inositol, dioleoylphosphatidyl inositol, 1-palmitoyl-2-oleyl-phosphatidyl inositol, 1-oleyl-2-palmitoyl-phosphatidyl inositol, and dierucoylphosphatidyl inositol.

[0234] Phospholipids may be of a symmetric or an asymmetric type. As used herein, the term “symmetric phospholipid” includes glycerophospholipids having matching fatty acid moieties and sphingolipids in which the variable fatty acid moiety and the hydrocarbon chain of the sphingosine backbone include a comparable number of carbon atoms. As used herein, the term “asymmetric phospholipid” includes lysolipids, glycerophospholipids having different fatty acid moieties (e.g., fatty acid moieties with different numbers of carbon atoms and/or unsaturations (e.g., double bonds)), and sphingolipids in which the variable fatty acid moiety and the hydrocarbon chain of the sphingosine backbone include a dissimilar number of carbon atoms (e.g., the variable fatty acid moiety include at least two more carbon atoms than the hydrocarbon chain or at least two fewer carbon atoms than the hydrocarbon chain).

[0235] In some aspects, the anchoring moiety comprises at least one symmetric phospholipid. Symmetric phospholipids may be selected from the non-limiting group consisting of 1,2 dipropionyl sn-glycero 3 phosphocholine (03:0 PC), 1,2 dibutyryl sn glycero 3 phosphocholine (04:0 PC), 1,2 dipentanoyl sn glycero 3 phosphocholine (05:0 PC), 1,2 dihexanoyl sn glycero 3 phosphocholine (06:0 PC), 1,2 diheptanoyl sn glycero 3 phosphocholine (07:0 PC), 1,2 dioctanoyl sn glycero 3 phosphocholine (08:0 PC), 1,2 dinonanoyl sn glycero 3 phosphocholine (09:0 PC), 1,2 didecanoyl sn glycero 3 phosphocholine (10:0 PC), 1,2 diundecanoyl sn glycero 3 phosphocholine (11:0 PC, DUPC), 1,2 dilauroyl sn glycero 3 phosphocholine (12:0 PC), 1,2 ditridecanoyl sn glycero 3 phosphocholine (13:0 PC), 1,2 dimyristoyl sn glycero 3 phosphocholine (14:0 PC, DMPC), 1,2 dipentadecanoyl sn glycero 3 phosphocholine (15:0 PC), 1,2 dipalmitoyl sn glycero 3 phosphocholine (16:0 PC, DPPC), 1,2 diphytanoyl sn glycero 3 phosphocholine (4ME 16:0 PC), 1,2 diheptadecanoyl sn glycero 3 phosphocholine (17:0 PC), 1,2 distearoyl sn glycero 3 phosphocholine (18:0 PC, DSPC), 1,2 dinonadecanoyl sn glycero 3 phosphocholine (19:0 PC), 1,2 diarachidoyl sn glycero 3 phosphocholine (20:0 PC), 1,2 dihenarachidoyl sn glycero 3 phosphocholine (21:0 PC), 1,2 dibehenoyl sn glycero 3 phosphocholine (22:0 PC), 1,2 ditricosanoyl sn glycero 3 phosphocholine (23:0 PC), 1,2 dilignoceroyl sn glycero 3 phosphocholine (24:0 PC), 1,2 dimyristoleoyl sn glycero 3 phosphocholine (14:1 (Δ9-Cis) PC), 1,2 dimyristelaidoyl sn glycero 3 phosphocholine (14:1 (Δ9-Trans) PC), 1,2 dipalmitoleoyl sn glycero 3 phosphocholine (16:1 (Δ9-Cis) PC), 1,2 dipalmitelaidoyl sn glycero 3 phosphocholine (16:1 (Δ9-Trans) PC), 1,2 dipetroselenoyl sn glycero 3 phosphocholine (18:1 (Δ6-Cis) PC), 1,2 dioleoyl sn glycero 3 phosphocholine (18:1 (Δ9-Cis) PC, DOPC), 1,2 dielaidoyl sn glycero 3 phosphocholine (18:1 (Δ9-Trans) PC), 1,2 dilinoleoyl sn glycero 3 phosphocholine (18:2 (Cis) PC, DLPC), 1,2 dilinolenoyl sn glycero 3 phosphocholine (18:3 (Cis) PC, DLnPC), 1,2 dieicosenoyl sn glycero 3 phosphocholine (20:1 (Cis) PC), 1,2 diarachidonoyl sn glycero 3 phosphocholine (20:4 (Cis) PC, DAPC), 1,2 dierucoyl sn glycero 3 phosphocholine (22:1 (Cis) PC), 1,2 didocosahexaenoyl sn glycero 3 phosphocholine (22:6 (Cis) PC, DHAPC), 1,2 dinervonoyl sn glycero 3 phosphocholine (24:1 (Cis) PC), 1,2 dihexanoyl sn glycero 3 phosphoethanolamine (06:0 PE), 1,2 dioctanoyl sn glycero 3 phosphoethanolamine (08:0 PE), 1,2 didecanoyl sn glycero 3 phosphoethanolamine (10:0 PE), 1,2 dilauroyl sn glycero 3 phosphoethanolamine (12:0 PE), 1,2 dimyristoyl sn glycero 3 phosphoethanolamine (14:0 PE), 1,2 dipentadecanoyl sn glycero 3 phosphoethanolamine (15:0 PE), 1,2 dipalmitoyl sn glycero 3 phosphoethanolamine (16:0 PE), 1,2 diphytanoyl sn glycero 3 phosphoethanolamine (4ME 16:0 PE), 1,2 diheptadecanoyl sn glycero 3 phosphoethanolamine (17:0 PE), 1,2 distearoyl sn glycero 3 phosphoethanolamine (18:0 PE, DSPE), 1,2 dipalmitoleoyl sn glycero 3 phosphoethanolamine (16:1 PE), 1,2 dioleoyl sn glycero 3 phosphoethanolamine (18:1 (Δ9-Cis) PE, DOPE), 1,2 dielaidoyl sn glycero 3 phosphoethanolamine (18:1 (Δ9-Trans) PE), 1,2 dilinoleoyl sn glycero 3 phosphoethanolamine (18:2 PE, DLPE), 1,2 dilinolenoyl sn glycero 3 phosphoethanolamine (18:3 PE, DLnPE), 1,2 diarachidonoyl sn glycero 3 phosphoethanolamine (20:4 PE, DAPE), 1,2 didocosahexaenoyl sn glycero 3 phosphoethanolamine (22:6 PE, DHAPE), 1,2 di O octadecenyl sn glycero 3 phosphocholine (18:0 Diether PC), 1,2 dioleoyl sn glycero 3 phospho rac (1 glycerol) sodium salt (DOPG), and any combination thereof.

[0236] In some aspects, the anchoring moiety comprises at least one symmetric phospholipid selected from the non-limiting group consisting of DLPC, DMPC, DOPC, DPPC, DSPC, DUPC, 18:0 Diether PC, DLnPC, DAPC, DHAPC, DOPE, 4ME 16:0 PE, DSPE, DLPE, DLnPE, DAPE, DHAPE, DOPG, and any combination thereof.

[0237] In some aspects, the anchoring moiety comprises at least one asymmetric phospholipid. Asymmetric phospholipids may be selected from the non-limiting group consisting of 1 myristoyl 2 palmitoyl sn glycero 3 phosphocholine (14:0-16:0 PC, MPPC), 1 myristoyl 2 stearoyl sn glycero 3 phosphocholine (14:0-18:0 PC, MSPC), 1 palmitoyl 2 acetyl sn glycero 3 phosphocholine (16:0-02:0 PC), 1 palmitoyl 2 myristoyl sn glycero 3 phosphocholine (16:0-14:0 PC, PMPC), 1 palmitoyl 2 stearoyl sn glycero 3 phosphocholine (16:0-18:0 PC, PSPC), 1 palmitoyl 2 oleoyl sn glycero 3 phosphocholine (16:0-18:1 PC, POPC), 1 palmitoyl 2 linoleoyl sn glycero 3 phosphocholine (16:0-18:2 PC, PLPC), 1 palmitoyl 2 arachidonoyl sn glycero 3 phosphocholine (16:0-20:4 PC), 1 palmitoyl 2 docosahexaenoyl sn glycero 3 phosphocholine (14:0-22:6 PC), 1 stearoyl 2 myristoyl sn glycero 3 phosphocholine (18:0-14:0 PC, SMPC), 1 stearoyl 2 palmitoyl sn glycero 3 phosphocholine (18:0-16:0 PC, SPPC), 1 stearoyl 2 oleoyl sn glycero 3 phosphocholine (18:0-18:1 PC, SOPC), 1 stearoyl 2 linoleoyl sn glycero 3 phosphocholine (18:0-18:2 PC), 1 stearoyl 2 arachidonoyl sn glycero 3 phosphocholine (18:0-20:4 PC), 1 stearoyl 2 docosahexaenoyl sn glycero 3 phosphocholine (18:0-22:6 PC), 1 oleoyl 2 myristoyl sn glycero 3 phosphocholine (18:1-14:0 PC, OMPC), 1 oleoyl 2 palmitoyl sn glycero 3 phosphocholine (18:1-16:0 PC, OPPC), 1 oleoyl 2 stearoyl sn glycero 3 phosphocholine (18:1-18:0 PC, OSPC), 1 palmitoyl 2 oleoyl sn glycero 3 phosphoethanolamine (16:0-18:1 PE, POPE), 1 palmitoyl 2 linoleoyl sn glycero 3 phosphoethanolamine (16:0-18:2 PE), 1 palmitoyl 2 arachidonoyl sn glycero 3 phosphoethanolamine (16:0-20:4 PE), 1 palmitoyl 2 docosahexaenoyl sn glycero 3 phosphoethanolamine (16:0-22:6 PE), 1 stearoyl 2 oleoyl sn glycero 3 phosphoethanolamine (18:0-18:1 PE), 1 stearoyl 2 linoleoyl sn glycero 3 phosphoethanolamine (18:0-18:2 PE), 1 stearoyl 2 arachidonoyl sn glycero 3 phosphoethanolamine (18:0-20:4 PE), 1 stearoyl 2 docosahexaenoyl sn glycero 3 phosphoethanolamine (18:0-22:6 PE), 1 oleoyl 2 cholesterylhemisuccinoyl sn glycero 3 phosphocholine (OChemsPC), and any combination thereof.

[0238] To provide more remarkable nuclease resistance, cellular uptake efficiency, and a more remarkable RNA interference effect, phosphatidylethanolamines may be used as anchoring moieties, for example, dimyristoylphosphatidyl ethanolamine, dipalmitoylphosphatidyl ethanolamine, 1-palmitoyl-2-oleyl-phosphatidyl ethanolamine, and dioleoylphosphatidyl ethanolamine.

[0239] The binding site of lipid (e.g., a phospholipid) and a linker combination or BAM, e.g., an ASO, may be suitably selected according to the types of lipid and linker or BAM. Any position other than hydrophobic groups of the lipid may be linked to the linker or BAM by a chemical bond. For example, when using a phosphatidylethanolamine, the linkage may be made by forming an amide bond, etc. between the amino group of phosphatidylethanolamine and the linker or BAM. When using a phosphatidylglycerol, the linkage may be made by forming an ester bond, an ether bond, etc. between the hydroxyl group of the glycerol residue and the linker or BAM. When using a phosphatidylserine, the linkage may be made by forming an amide bond or an ester bond, etc. between the amino group or carboxyl group of the serine residue and the linker or BAM. When using a phosphatidic acid, the linkage may be made by forming a phosphoester bond, etc. between the phosphate residue and the linker or BAM. When using a phosphatidylinositol, the linkage may be made by forming an ester bond, an ether bond, etc. between the hydroxyl group of the inositol residue and the linker or BAM.

[0240] II.A.4. Lysolipids (e.g., Lysophospholipids)

[0241] In some aspects, the anchoring moiety comprises a lysolipid, e.g., a lysophospholipid. Lysolipids are derivatives of a lipid in which one or both fatty acyl chains have been removed, generally by hydrolysis. Lysophospholipids are derivatives of a phospholipid in which one or both fatty acyl chains have been removed by hydrolysis.

[0242] In some aspects, the anchoring moiety comprises any of the phospholipids disclosed above, in which one or both acyl chains have been removed via hydrolysis, and therefore the resulting lysophospholipid comprises one or no fatty acid acyl chain.

[0243] In some aspects, the anchoring moiety comprises a lysoglycerophospholipid, a lysoglycosphingoliopid, a lysophosphatidylcholine, a lysophosphatidylethanolamine, a lysophosphatidylinositol, or a lysophosphatidylserine.

[0244] In some aspect, the anchoring moiety comprises a lysolipid selected from the non-limiting group consisting of 1 hexanoyl 2 hydroxy sn glycero 3 phosphocholine (06:0 Lyso PC), 1 heptanoyl 2 hydroxy sn glycero 3 phosphocholine (07:0 Lyso PC), 1 octanoyl 2 hydroxy sn glycero 3 phosphocholine (08:0 Lyso PC), 1 nonanoyl 2 hydroxy sn glycero 3 phosphocholine (09:0 Lyso PC), 1 decanoyl 2 hydroxy sn glycero 3 phosphocholine (10:0 Lyso PC), 1 undecanoyl 2 hydroxy sn glycero 3 phosphocholine (11:0 Lyso PC), 1 lauroyl 2 hydroxy sn glycero 3 phosphocholine (12:0 Lyso PC), 1 tridecanoyl 2 hydroxy sn glycero 3 phosphocholine (13:0 Lyso PC), 1 myristoyl 2 hydroxy sn glycero 3 phosphocholine (14:0 Lyso PC), 1 pentadecanoyl 2 hydroxy sn glycero 3 phosphocholine (15:0 Lyso PC), 1 palmitoyl 2 hydroxy sn glycero 3 phosphocholine (16:0 Lyso PC), 1 heptadecanoyl 2 hydroxy sn glycero 3 phosphocholine (17:0 Lyso PC), 1 stearoyl 2 hydroxy sn glycero 3 phosphocholine (18:0 Lyso PC), 1 oleoyl 2 hydroxy sn glycero 3 phosphocholine (18:1 Lyso PC), 1 nonadecanoyl 2 hydroxy sn glycero 3 phosphocholine (19:0 Lyso PC), 1 arachidoyl 2 hydroxy sn glycero 3 phosphocholine (20:0 Lyso PC), 1 behenoyl 2 hydroxy sn glycero 3 phosphocholine (22:0 Lyso PC), 1 lignoceroyl 2 hydroxy sn glycero 3 phosphocholine (24:0 Lyso PC), 1 hexacosanoyl 2 hydroxy sn glycero 3 phosphocholine (26:0 Lyso PC), 1 myristoyl 2 hydroxy sn glycero 3 phosphoethanolamine (14:0 Lyso PE), 1 palmitoyl 2 hydroxy sn glycero 3 phosphoethanolamine (16:0 Lyso PE), 1 stearoyl 2 hydroxy sn glycero 3 phosphoethanolamine (18:0 Lyso PE), 1 oleoyl 2 hydroxy sn glycero 3 phosphoethanolamine (18:1 Lyso PE), 1 hexadecyl sn glycero 3 phosphocholine (C16 Lyso PC), and any combination thereof.

[0245] II.A.5 Vitamins

[0246] In some aspects, the anchoring moiety comprises a lipophilic vitamin, e.g., folic acid, vitamin A, vitamin E, or vitamin K In some aspects, the anchoring moiety comprises vitamin A. Vitamin A is a group of unsaturated nutritional organic compounds that includes retinol, retinal, retinoic acid, and several provitamin A carotenoids (most notably beta-carotene). In some aspects, the anchoring moiety comprises retinol. In some aspects, the anchoring moiety comprises a retinoid. Retinoids are a class of chemical compounds that are vitamers of vitamin A or are chemically related to it. In some aspects, the anchoring moiety comprises a first generation retinoid (e.g., retinol, tretinoin, isotreatinoin, or alitretinoin), a second-generation retinoid (e.g., etretinate or acitretin), a third-generation retinoid (e.g., adapalene, bexarotene, or tazarotene), or any combination thereof

| | First-generation retinoids |
|---|---|
| retinol | [chemical structure] |
| tretinoin (alt-trans-retinoic acid) | [chemical structure] |
| isotretinoin (13-cis-retinoic acid) | [chemical structure] |
| alitretinoin (9-cis-retinoic acid) | [chemical structure] |
| | Second-generation retinoids |
| etretinate | [chemical structure] |
| acitretin | [chemical structure] |
| | Third-generation retinoids |
| adapalene | [chemical structure] |
| bexarotene | [chemical structure] |
| tazarotene | [chemical structure] |

[chemical structure]

[0247] In some aspects, the anchoring moiety comprises vitamin E. Tocopherols are a class of methylated phenols many of which have vitamin E activity. Thus, in some aspects, the anchoring moiety comprises alpha-tocopherol, beta-tocopherol, gamma-tocopherol, delta-tocopherol, or a combination thereof.

[chemical structure]

[0248] Tocotrienols also have vitamin E activity. The critical chemical structural difference between tocotrienols and tocoherols is that tocotrienols have unsaturated isorenoid side chain with three carbon-carbon double bonds versus saturated side chains for tocopherols. In some aspects, the anchoring moiety comprises alpha-tocotrienol, beta-tocotrienol, gamma-tocotrienol, delta-tocotrienol, or a combination thereof. Tocotrienols can be represented by the formula below

[chemical structure]

alpha(α)-Tocotrienol: R1=Me, R2=Me, R3=Me;
beta(β)-Tocotrienol: R1=Me, R2=H, R3=Me;
gamma(γ)-Tocotrienol: R1=H, R2=Me, R3=Me;
delta(δ)-Tocotrienol: R1=H, R2=H, R3=Me.

[0249] In some aspects, the anchoring moiety comprises vitamin K. Chemically, the vitamin K family comprises 2-methyl-1.4-naphthoquinone (3-) derivatives. Vitamin K includes two natural vitamers: vitamin K₁ and vitamin K₂. The structure of vitamin K₁ (also known as phytonadione, phylloquinone, or (E)-phytonadione) is marked by the presence of a phytyl group. The structures of vitamin K₂ (menaquinones) are marked by the polyisoprenyl side chain present in the molecule that can contain six to 13 isoprenyl units. Thus, vitamin K₂ consists of a number of related chemical subtypes, with differing lengths of carbon side chains made of isoprenoid groups of atoms. MK-4 is the most common form of vitamin K₂. Long chain forms, such as MK-7, MK-8 and MK-9 are predominant in fermented foods. Longer chain forms of vitamin K₂ such as MK-10 to MK-13 are synthesized by bacteria, but they are not well absorbed and have little biological function. In addition to the natural forms of vitamin K, there is a number of synthetic forms of vitamin K such as vitamin K₃ (menadione; 2-methylnaphthalene-1,4-dione), vitamin K₄, and vitamin K₅.

[0250] Accordingly, in some aspects, the anchoring moiety comprises vitamin K₁, K2 (e.g., MK-4, MK-5, MK-6, MK-7, MK-8, MK-9, MK-10, MK-11, MK-12, or MK-13), K3, K4, K5, or any combination thereof.

[chemical structure]

[0251] II.B. Linker Combinations

[0252] In some aspects, a BAM is linked to a hydrophobic membrane anchoring moiety disclosed herein via a linker combination, which can comprise any combination of cleavable and/or non-cleavable linkers. The main function of a linker combination is to provide the optimal spacing between the anchoring moiety or moieties and the BAM target. For example, in the case of an ASO, the linker combination should reduce steric hindrances and position the ASO so it can interact with a target nucleic acid, e.g., a mRNA or a miRNA.

[0253] Linkers may be susceptible to cleavage (“cleavable linker”) thereby facilitating release of the biologically active molecule. Thus, in some aspects, a linker combination disclosed herein can comprise a cleavable linker. Such cleavable linkers may be susceptible, for example, to acid-induced cleavage, photo-induced cleavage, peptidase-induced cleavage, esterase-induced cleavage, and disulfide bond cleavage, at conditions under which the biologically active molecule remains active. Alternatively, linkers may be substantially resistant to cleavage (“non-cleavable linker”). In some aspects, the cleavable linker comprises a spacer. In some aspects the spacer is PEG.

[0254] In some aspects, a linker combination comprises at least 2, at least 3, at least 4, at least 5, or at least 6 or more different linkers disclosed herein. In some aspects, linkers in a linker combination can be linked by an ester linkage (e.g., phosphodiester or phosphorothioate ester).

[0255] In some aspects, the linker is direct bond between an anchoring moiety and a BAM, e.g., an ASO.

[0256] II.B.1 Non-Cleavable Linkers

[0257] In some aspects, the linker combination comprises a “non-cleavable liker.” Non-cleavable linkers are any chemical moiety capable of linking two or more components of a modified biologically active molecule of the present disclosure (e.g., a biologically active molecule and an anchoring moiety; a biologically active molecule and a cleavable linker; an anchoring moiety and a cleavable linker) in a stable, covalent manner and does not fall off under the categories listed above for cleavable linkers. Thus, non-cleavable linkers are substantially resistant to acid-induced cleavage, photo-induced cleavage, peptidase-induced cleavage, esterase-induced cleavage and disulfide bond cleavage.

[0258] Furthermore, non-cleavable refers to the ability of the chemical bond in the linker or adjoining to the linker to withstand cleavage induced by an acid, photolabile-cleaving agent, a peptidase, an esterase, or a chemical or physiological compound that cleaves a disulfide bond, at conditions under which a cyclic dinucleotide and/or the antibody does not lose its activity. In some aspects, the biologically active molecule is attached to the linker via another linker, e.g., a self-immolative linker.

[0259] In some aspects, the linker combination comprises a non-cleavable linker comprising, e.g., tetraethylene glycol (TEG), hexaethylene glycol (HEG), polyethylene glycol (PEG), succinimide, or any combination thereof. In some aspects, the non-cleavable linker comprises a spacer unit to link the biologically active molecule to the non-cleavable linker.

[0260] In some aspects, one or more non-cleavable linkers comprise smaller units (e.g., HEG, TEG, glycerol, C2 to C12 alkyl, and the like) linked together. In one aspect, the linkage is an ester linkage (e.g., phosphodiester or phosphorothioate ester) or other linkage.

[0261] II.B.1.a. Ethylene Glycols (HEG, TEG, PEG)

[0262] In some aspects, the linker combination comprises a non-cleavable linker, wherein the non-cleavable linker comprises a polyethylene glycol (PEG) characterized by a formula R³—(O—CH₂—CH₂)ₙ— or R³—(O—CH₂—CH₂)ₙ—O— with R3 being hydrogen, methyl or ethyl and n having a value from 2 to 200. In some aspects, the linker comprises a spacer, wherein the spacer is PEG.

[0263] In some aspects, the PEG linker is an oligo-ethylene glycol, e.g., diethylene glycol, triethylene glycol, tetra ethylene glycol (TEG), pentaethylene glycol, or a hexaethylene glycol (HEG) linker.

[0264] In some aspects, n has a value of 2, 3, 4, 5, 6, 7, 8, 9, 10, 11, 12, 13, 14, 15, 16, 17,18,19, 20, 21, 22, 23, 24, 25, 26, 27, 28, 29, 30, 31, 32, 33, 34, 35, 36, 37, 38, 39, 40, 41, 42, 43, 44, 45, 46, 47, 48, 49, 50, 51, 52, 53, 54, 55, 56, 57, 58, 59, 60, 61, 62, 63, 64, 65, 66, 67, 68, 69, 70, 71, 72, 73, 74, 75, 76, 77, 78, 79, 80, 81, 82, 83, 84, 85, 86, 87, 88, 89, 90, 91, 92, 93, 94, 95, 96, 97, 98, 99, 100, 101, 102, 103, 104, 105, 106, 107, 108, 109, 110, 111, 112, 113, 114, 115, 116, 117, 118, 119, 120, 121, 122, 123, 124, 125, 126, 127, 128, 129, 130, 131, 132, 133, 134, 135, 136, 137, 138, 139, 140, 141, 142, 143, 144, 145, 146, 147, 148, 149, 150, 151, 152, 153, 154, 155, 156, 157, 158, 159, 160, 161, 162, 163, 164, 165, 166, 167, 168, 169, 170, 171, 172, 173, 174, 175, 176, 177, 178, 179, 189, 181, 182, 183, 184, 185, 186, 187, 188, 189, 190, 191, 192, 193, 194, 195, 196, 197, 198, 199, or 200. In some aspects, n is between 2 and 10, between 10 and 20, between 20 and 30, between 30 and 40, between 40 and 50, between 50 and 60, between 60 and 70, between 70 and 80, between 80 and 90, between 90 and 100, between 100 and 110, between 110 and 120, between 120 and 130, between 130 and 140, between 140 and 150, between 150 and 160, between 160 and 170, between 170 and 180, between 180 and 190, or between 190 and 200. In some specific aspects, n has a value from 3 to 200, from 3 to 20, from 10 to 30, or from 9 to 45. In some aspects, the PEG is a branched PEG. Branched PEGs have three to ten PEG chains emanating from a central core group.

[0265] In certain aspects, the PEG moiety is a monodisperse polyethylene glycol. In the context of the present disclosure, a monodisperse polyethylene glycol (mdPEG) is a PEG that has a single, defined chain length and molecular weight. mdPEGs are typically generated by separation from the polymerization mixture by chromatography. In certain formulae, a monodisperse PEG moiety is assigned the abbreviation mdPEG.

[0266] In some aspects, the PEG is a Star PEG. Star PEGs have 10 to 100 PEG chains emanating from a central core group. In some aspects, the PEG is a Comb PEGs. Comb PEGs have multiple PEG chains normally grafted onto a polymer backbone.

[0267] In certain aspects, the PEG has a molar mass between 100 g/mol and 3000 g/mol, particularly between 100 g/mol and 2500 g/mol, more particularly of approx. 100 g/mol to 2000 g/mol. In certain aspects, the PEG has a molar mass between 200 g/mol and 3000 g/mol, particularly between 300 g/mol and 2500 g/mol, more particularly of approx. 400 g/mol to 2000 g/mol.

[0268] In some aspects, the PEG is PEG₁₀₀, PEG₂₀₀, PEG₃₀₀, PEG₄₀₀, PEG₅₀₀, PEG₆₀₀, PEG₇₀₀, PEG₈₀₀, PEG₉₀₀, PEG₁₀₀₀, PEG₁₁₀₀, PEG₁₂₀₀, PEG₁₃₀₀, PEG₁₄₀₀, PEG₁₅₀₀, PEG₁₆₀₀, PEG₁₇₀₀, PEG₁₈₀₀, PEG₁₉₀₀, PEG₂₀₀₀, PEG₂₁₀₀, PEG₂₂₀₀, PEG₂₃₀₀, PEG₂₄₀₀, PEG₂₅₀₀, PEG₁₆₀₀, PEG₁₇₀₀, PEG₁₈₀₀, PEG₁₉₀₀, PEG₂₀₀₀, PEG₂₁₀₀, PEG₂₂₀₀, PEG₂₃₀₀, PEG₂₄₀₀, PEG₂₅₀₀, PEG₂₆₀₀, PEG₂₇₀₀, PEG₂₈₀₀, PEG₂₉₀₀, or PEG₃₀₀₀. In one particular aspect, the PEG is PEG₄₀₀. In another particular aspect, the PEG is PEG₂₀₀₀.

[0269] In some aspects, a linker combination of the present disclosure can comprise several PEG linkers, e.g., a cleavable linker flanked by PEG, HEG, or TEG linkers. In some aspects, the linker combination comprises (HEG)n and/or (TEG)n, wherein n is an integer between 1 and 50, and each unit is connected, e.g., via a phosphate ester linker, a phosphorothioate ester linkage, or a combination thereof.

[0270] II.B.1.b. Glycerol and Polyglycerols (PG)

[0271] In some aspects, the linker combination comprises a non-cleavable linker comprising a glycerol unit or a polyglycerol (PG) described by the formula ((R3-O—(CH₂—CHOH—CH₂O)ₙ—) with R3 being hydrogen, methyl or ethyl, and n having a value from 3 to 200. In some aspects, n has a value from 3 to 20. In some aspects, n has a value from 10 to 30.

[0272] In some aspects, the PG linker is a diglycerol, triglycerol, tetraglycerol (TG), pentaglycerol, or a hexaglycerol (HG) linker. In some aspects, n has a value of 2, 3, 4, 5, 6, 7, 8, 9, 10, 11, 12, 13, 14, 15, 16, 17,18,19, 20, 21, 22, 23, 24, 25, 26, 27, 28, 29, 30, 31, 32, 33, 34, 35, 36, 37, 38, 39, 40, 41, 42, 43, 44, 45, 46, 47, 48, 49, 50, 51, 52, 53, 54, 55, 56, 57, 58, 59, 60, 61, 62, 63, 64, 65, 66, 67, 68, 69, 70, 71, 72, 73, 74, 75, 76, 77, 78, 79, 80, 81, 82, 83, 84, 85, 86, 87, 88, 89, 90, 91, 92, 93, 94, 95, 96, 97, 98, 99, 100, 101, 102, 103, 104, 105, 106, 107, 108, 109, 110, 111, 112, 113, 114, 115, 116, 117, 118, 119, 120, 121, 122, 123, 124, 125, 126, 127, 128, 129, 130, 131, 132, 133, 134, 135, 136, 137, 138, 139, 140, 141, 142, 143, 144, 145, 146, 147, 148, 149, 150, 151, 152, 153, 154, 155, 156, 157, 158, 159, 160, 161, 162, 163, 164, 165, 166, 167, 168, 169, 170, 171, 172, 173, 174, 175, 176, 177, 178, 179, 189, 181, 182, 183, 184, 185, 186, 187, 188, 189, 190, 191, 192, 193, 194, 195, 196, 197, 198, 199, or 200. In some aspects, n is between 2 and 10, between 10 and 20, between 20 and 30, between 30 and 40, between 40 and 50, between 50 and 60, between 60 and 70, between 70 and 80, between 80 and 90, between 90 and 100, between 100 and 110, between 110 and 120, between 120 and 130, between 130 and 140, between 140 and 150, between 150 and 160, between 160 and 170, between 170 and 180, between 180 and 190, or between 190 and 200.

[0273] In some alternatives of these aspects, n has a value from 9 to 45. In some aspects, the heterologous moiety is a branched polyglycerol described by the formula (R³—O—(CH₂—CHOR⁵—CH₂—O)ₙ—) with R⁵ being hydrogen or a linear glycerol chain described by the formula (R³—O—(CH₂—CHOH—CH₂—O)ₙ—) and R3 being hydrogen, methyl or ethyl. In some aspects, the heterologous moiety is a hyperbranched polyglycerol described by the formula (R³—O—(CH₂—CHOR⁵—CH₂—O)ₙ—) with R⁵ being hydrogen or a glycerol chain described by the formula (R³—O—(CH₂—CHOR⁶—CH₂—O)ₙ—), with R⁶ being hydrogen or a glycerol chain described by the formula (R³—O—(CH₂—CHOR⁷—CH₂—O)ₙ—), with R⁷ being hydrogen or a linear glycerol chain described by the formula (R³—O—(CH₂—CHOH—CH₂—O)ₙ—) and R3 being hydrogen, methyl or ethyl. Hyperbranched glycerol and methods for its synthesis are described in Oudshorn et al. (2006) Biomaterials 27:5471-5479; Wilms et al. (20100 Acc. Chem. Res. 43, 129-41, and references cited therein.

[0274] In certain aspects, the PG has a molar mass between 100 g/mol and 3000 g/mol, particularly between 100 g/mol and 2500 g/mol, more particularly of approx. 100 g/mol to 2000 g/mol. In certain aspects, the PG has a molar mass between 200 g/mol and 3000 g/mol, particularly between 300 g/mol and 2500 g/mol, more particularly of approx. 400 g/mol to 2000 g/mol.

[0275] In some aspects, the PG is PG₁₀₀, PG₂₀₀, PG₃₀₀, PG₄₀₀, PG₅₀₀, PG₆₀₀, PG₇₀₀, PG₈₀₀, PG₉₀₀, PG₁₀₀₀, PG₁₁₀₀, PG₁₂₀₀, PG₁₃₀₀, PG₁₄₀₀, PG₁₅₀₀, PG₁₆₀₀, PG₁₇₀₀, PG₁₈₀₀, PG₁₀₀₀, PG₂₀₀₀, PG₂₁₀₀, PG₂₂₀₀, PG₂₃₀₀, PG₂₄₀₀, PG₂₅₀₀, PG₁₆₀₀, PG₁₇₀₀, PG₁₈₀₀, PG₁₉₀₀, PG₂₀₀₀, PG₂₁₀₀, PG₂₂₀₀, PG₂₃₀₀, PG₂₄₀₀, PG₂₅₀₀, PG₂₆₀₀, PG₂₇₀₀, PG₂₈₀₀, PG₂₉₀₀, or PG₃₀₀₀. In one particular aspect, the PG is PG₄₀₀. In another particular aspect, the PG is PG₂₀₀₀.

[0276] In some aspects, the linker combination comprises (glycerol)n, and/or (HG)n and/or (TG)n, wherein n is an integer between 1 and 50, and each unit is connected, e.g., via a phosphate ester linker, a phosphorothioate ester linkage, or a combination thereof.

[0277] II.B.1.c. Aliphatic (Alkyl) Linkers

[0278] In some aspects, the linker combination comprises at least one aliphatic (alkyl) linker, e.g., propyl, butyl, hexyl, or C2-C12 alkyl, such as C2-C10 alkyl or C2-C6 alkyl.

[0279] In some aspects, the linker combination comprises an alkyl chain, e.g., an unsubstituted alkyl. In some aspects, the linker combination comprises an substituted or unsubstituted alkenyl, substituted or unsubstituted alkynyl, arylalkyl, arylalkenyl, arylalkynyl, heteroarylalkyl, heteroarylalkenyl, heteroarylalkynyl, heterocyclylalkyl, heterocyclylalkenyl, heterocyclylalkynyl, Aryl, heteroaryl, heterocyclyl, cycloalkyl, cycloalkenyl, alkylarylalkyl, alkylarylalkenyl, alkylarylalkynyl, alkenylarylalkyl, alkenyl Reyl alkenyl, alkenyl aryl alkynyl, alkynyl aryl alkyl, alkynyl aryl alkenyl, alkynyl aryl alkynyl, alkyl heteroaryl alkyl, alkyl heteroaryl alkyl, alkyl heteroaryl alkenyl, alkyl heteroaryl alkynyl, alkenyl heteroaryl alkyl, alkenyl heteroaryl alkenyl, alkenyl heteroaryl alkynyl, alkynyl Heteroarylalkyl, alkynylheteroarylalkenyl, alkynylheteroarylalkynyl, alkylheterocyclylalkyl, alkylheterocyclylalkenyl, alkylheterocyclylalkynyl, alkenylheterocyclylalkyl, alkenylheterocyclylalkenyl, or alkenylheterocyclylalkynyl.

[0280] Optionally these components are substituted. Substituents include alcohol, alkoxy (such as methoxy, ethoxy, and propoxy), straight or branched chain alkyl (such as C1-C12 alkyl), amine, aminoalkyl (such as amino C1-C12 alkyl), phosphoramidite, phosphate, phosphoramidate, phosphorodithioate, thiophosphate, hydrazide, hydrazine, halogen, (such as F, Cl, Br, or I), amide, alkylamide (such as amide C1-C12 alkyl), carboxylic acid, carboxylic ester, carboxylic anhydride, carboxylic acid halide, ether, sulfonyl halide, imidate ester, isocyanate, isothiocyanate, haloformate, carboduimide adduct, aldehydes, ketone, sulfhydryl, haloacetyl, alkyl halide, alkyl sulfonate, C(═O)CH═CHC(═O) (maleimide), thioether, cyano, sugar (such as mannose, galactose, and glucose), α,β-unsaturated carbonyl, alkyl mercurial, or α,β-unsaturated sulfone.

[0281] The term “alkyl,” by itself or as part of another substituent, means, unless otherwise stated, a straight or branched chain hydrocarbon radical having the number of carbon atoms designated (e.g., C₁-C₁₀ means one to ten carbon atoms). Typically, an alkyl group will have from 1 to 24 carbon atoms, for example having from 1 to 10 carbon atoms, from 1 to 8 carbon atoms or from 1 to 6 carbon atoms. A “lower alkyl” group is an alkyl group having from 1 to 4 carbon atoms. The term “alkyl” includes di- and multivalent radicals. For example, the term “alkyl” includes “alkylene” wherever appropriate, e.g., when the formula indicates that the alkyl group is divalent or when substituents are joined to form a ring. Examples of alkyl radicals include, but are not limited to, methyl, ethyl, n-propyl, iso-propyl, n-butyl, tert-butyl, iso-butyl, sec-butyl, as well as homologs and isomers of, for example, n-pentyl, n-hexyl, n-heptyl and n-octyl.

[0282] The term “alkylene” by itself or as part of another substituent means a divalent (diradical) alkyl group, wherein alkyl is defined herein. “Alkylene” is exemplified, but not limited, by —CH₂CH₂CH₂CH₂—. Typically, an “alkylene” group will have from 1 to 24 carbon atoms, for example, having 10 or fewer carbon atoms (e.g., 1 to 8 or 1 to 6 carbon atoms). A “lower alkylene” group is an alkylene group having from 1 to 4 carbon atoms.

[0283] The term “alkenyl” by itself or as part of another substituent refers to a straight or branched chain hydrocarbon radical having from 2 to 24 carbon atoms and at least one double bond. A typical alkenyl group has from 2 to 10 carbon atoms and at least one double bond. In one aspect, alkenyl groups have from 2 to 8 carbon atoms or from 2 to 6 carbon atoms and from 1 to 3 double bonds. Exemplary alkenyl groups include vinyl, 2-propenyl, 1-but-3-enyl, crotyl, 2-(butadienyl), 2,4-pentadienyl, 3-(1,4-pentadienyl), 2-isopentenyl, 1-pent-3-enyl, 1-hex-5-enyl and the like.

[0284] The term “alkynyl” by itself or as part of another substituent refers to a straight or branched chain, unsaturated or polyunsaturated hydrocarbon radical having from 2 to 24 carbon atoms and at least one triple bond. A typical “alkynyl” group has from 2 to 10 carbon atoms and at least one triple bond. In one aspect of the disclosure, alkynyl groups have from 2 to 6 carbon atoms and at least one triple bond. Exemplary alkynyl groups include prop-1-ynyl, prop-2-ynyl (i.e., propargyl), ethynyl and 3-butynyl.

[0285] The terms “alkoxy,” “alkylamino” and “alkylthio” (or thioalkoxy) are used in their conventional sense, and refer to alkyl groups that are attached to the remainder of the molecule via an oxygen atom, an amino group, or a sulfur atom, respectively.

[0286] The term “heteroalkyl,” by itself or in combination with another term, means a stable, straight or branched chain hydrocarbon radical consisting of the stated number of carbon atoms (e.g., C₂-C₁₀, or C₂-C₈) and at least one heteroatom chosen, e.g., from N, O, S, Si, B and P (in one aspect, N, O and S), wherein the nitrogen, sulfur and phosphorus atoms are optionally oxidized, and the nitrogen atom(s) are optionally quaternized. The heteroatom(s) is/are placed at any interior position of the heteroalkyl group. Examples of heteroalkyl groups include, but are not limited to, —CH₂—CH₂—O—CH₃, —CH₂—CH₂—NH—CH₃, —CH₂—CH₂—N(CH₃)—CH₃, —CH₂—S—CH₂—CH₃, —CH₂—CH₂—S(O)—CH₃, —CH₂—CH₂—S(O)₂—CH₃, —CH═CH—O—CH₃, —CH₂—Si(CH₃)₃, —CH₂—CH═N—OCH₃, and —CH═CH—N(CH₃)—CH₃. Up to two heteroatoms can be consecutive, such as, for example, —CH₂—NH—OCH₃ and —CH₂—O—Si(CH₃)₃.

[0287] Similarly, the term “heteroalkylene” by itself or as part of another substituent means a divalent radical derived from heteroalkyl, as exemplified, but not limited by, —CH₂—CH₂—S—CH₂—CH₂— and —CH₂—S—CH₂—CH₂—NH—CH₂—. Typically, a heteroalkyl group will have from 3 to 24 atoms (carbon and heteroatoms, excluding hydrogen) (3- to 24-membered heteroalkyl). In another example, the heteroalkyl group has a total of 3 to 10 atoms (3- to 10-membered heteroalkyl) or from 3 to 8 atoms (3- to 8-membered heteroalkyl). The term “heteroalkyl” includes “heteroalkylene” wherever appropriate, e.g., when the formula indicates that the heteroalkyl group is divalent or when substituents are joined to form a ring.

[0288] The term “cycloalkyl” by itself or in combination with other terms, represents a saturated or unsaturated, non-aromatic carbocyclic radical having from 3 to 24 carbon atoms, for example, having from 3 to 12 carbon atoms (e.g., C₃-C₈ cycloalkyl or C₃-C₆ cycloalkyl). Examples of cycloalkyl include, but are not limited to, cyclopropyl, cyclobutyl, cyclopentyl, cyclohexyl, cycloheptyl, 1-cyclohexenyl, 3-cyclohexenyl, cycloheptyl and the like. The term “cycloalkyl” also includes bridged, polycyclic (e.g., bicyclic) structures, such as norbornyl, adamantyl and bicyclo[2.2.1]heptyl. The “cycloalkyl” group can be fused to at least one (e.g., 1 to 3) other ring selected from aryl (e.g., phenyl), heteroaryl (e.g., pyridyl) and non-aromatic (e.g., carbocyclic or heterocyclic) rings. When the “cycloalkyl” group includes a fused aryl, heteroaryl or heterocyclic ring, then the “cycloalkyl” group is attached to the remainder of the molecule via the carbocyclic ring.

[0289] The term “heterocycloalkyl,” “heterocyclic,” “heterocycle,” or “heterocyclyl,” by itself or in combination with other terms, represents a carbocyclic, non-aromatic ring (e.g., 3- to 8-membered ring and for example, 4-, 5-, 6- or 7-membered ring) containing at least one and up to 5 heteroatoms selected from, e.g., N, O, S, Si, B and P (for example, N, O and S), wherein the nitrogen, sulfur and phosphorus atoms are optionally oxidized, and the nitrogen atom(s) are optionally quaternized (e.g., from 1 to 4 heteroatoms selected from nitrogen, oxygen and sulfur), or a fused ring system of 4- to 8-membered rings, containing at least one and up to 10 heteroatoms (e.g., from 1 to 5 heteroatoms selected from N, O and S) in stable combinations known to those of skill in the art. Exemplary heterocycloalkyl groups include a fused phenyl ring. When the “heterocyclic” group includes a fused aryl, heteroaryl or cycloalkyl ring, then the “heterocyclic” group is attached to the remainder of the molecule via a heterocycle. A heteroatom can occupy the position at which the heterocycle is attached to the remainder of the molecule.

[0290] Exemplary heterocycloalkyl or heterocyclic groups of the present disclosure include morpholinyl, thiomorpholinyl, thiomorpholinyl S-oxide, thiomorpholinyl S,S-dioxide, piperazinyl, homopiperazinyl, pyrrolidinyl, pyrrolinyl, imidazolidinyl, tetrahydropyranyl, piperidinyl, tetrahydrofuranyl, tetrahydrothienyl, piperidinyl, homopiperidinyl, homomorpholinyl, homothiomorpholinyl, homothiomorpholinyl S,S-dioxide, oxazolidinonyl, dihydropyrazolyl, dihydropyrrolyl, dihydropyrazolyl, dihydropyridyl, dihydropyrimidinyl, dihydrofuryl, dihydropyranyl, tetrahydrothienyl S-oxide, tetrahydrothienyl S,S-dioxide, homothiomorpholinyl S-oxide, 1-(1,2,5,6-tetrahydropyridyl), 1-piperidinyl, 2-piperidinyl, 3-piperidinyl, 4-morpholinyl, 3-morpholinyl, tetrahydrofuran-2-yl, tetrahydrofuran-3-yl, tetrahydrothien-2-yl, tetrahydrothien-3-yl, 1-piperazinyl, 2-piperazinyl, and the like.

[0291] By “aryl” is meant a 5-, 6- or 7-membered, aromatic carbocyclic group having a single ring (e.g., phenyl) or being fused to other aromatic or non-aromatic rings (e.g., from 1 to 3 other rings). When the “aryl” group includes a non-aromatic ring (such as in 1,2,3,4-tetrahydronaphthyl) or heteroaryl group then the “aryl” group is bonded to the remainder of the molecule via an aryl ring (e.g., a phenyl ring). The aryl group is optionally substituted (e.g., with 1 to 5 substituents described herein). In one example, the aryl group has from 6 to 10 carbon atoms. Non-limiting examples of aryl groups include phenyl, 1-naphthyl, 2-naphthyl, quinoline, indanyl, indenyl, dihydronaphthyl, fluorenyl, tetralinyl, benzo[d][1,3]dioxolyl or 6,7,8,9-tetrahydro-5H-benzo[a]cycloheptenyl. In one aspects, the aryl group is selected from phenyl, benzo[d][1,3]dioxolyl and naphthyl. The aryl group, in yet another aspect, is phenyl.

[0292] The term “arylalkyl” or “aralkyl” is meant to include those radicals in which an aryl group or heteroaryl group is attached to an alkyl group to create the radicals -alkyl-aryl and -alkyl-heteroaryl, wherein alkyl, aryl and heteroaryl are defined herein. Exemplary “arylalkyl” or “aralkyl” groups include benzyl, phenethyl, pyridylmethyl and the like.

[0293] By “aryloxy” is meant the group —O-aryl, where aryl is as defined herein. In one example, the aryl portion of the aryloxy group is phenyl or naphthyl. The aryl portion of the aryloxy group, in one aspect, is phenyl.

[0294] The term “heteroaryl” or “heteroaromatic” refers to a polyunsaturated, 5-, 6- or 7-membered aromatic moiety containing at least one heteroatom (e.g., 1 to 5 heteroatoms, such as 1-3 heteroatoms) selected from N, O, S, Si and B (for example, N, O and S), wherein the nitrogen and sulfur atoms are optionally oxidized, and the nitrogen atom(s) are optionally quaternized. The “heteroaryl” group can be a single ring or be fused to other aryl, heteroaryl, cycloalkyl or heterocycloalkyl rings (e.g., from 1 to 3 other rings). When the “heteroaryl” group includes a fused aryl, cycloalkyl or heterocycloalkyl ring, then the “heteroaryl” group is attached to the remainder of the molecule via the heteroaryl ring. A heteroaryl group can be attached to the remainder of the molecule through a carbon- or heteroatom.

[0295] In one example, the heteroaryl group has from 4 to 10 carbon atoms and from 1 to 5 heteroatoms selected from O, S and N. Non-limiting examples of heteroaryl groups include pyridyl, pyrimidinyl, quinolinyl, benzothienyl, indolyl, indolinyl, pyridazinyl, pyrazinyl, isoindolyl, isoquinolyl, quinazolinyl, quinoxalinyl, phthalazinyl, imidazolyl, isoxazolyl, pyrazolyl, oxazolyl, thiazolyl, indolizinyl, indazolyl, benzothiazolyl, benzimidazolyl, benzofuranyl, furanyl, thienyl, pyrrolyl, oxadiazolyl, thiadiazolyl, triazolyl, tetrazolyl, isothiazolyl, naphthyridinyl, isochromanyl, chromanyl, tetrahydroisoquinolinyl, isoindolinyl, isobenzotetrahydrofuranyl, isobenzotetrahydrothienyl, isobenzothienyl, benzoxazolyl, pyridopyridyl, benzotetrahydrofuranyl, benzotetrahydrothienyl, purinyl, benzodioxolyl, triazinyl, pteridinyl, benzothiazolyl, imidazopyridyl, imidazothiazolyl, dihydrobenzisoxazinyl, benzisoxazinyl, benzoxazinyl, dihydrobenzisothiazinyl, benzopyranyl, benzothiopyranyl, chromonyl, chromanonyl, pyridyl-N-oxide, tetrahydroquinolinyl, dihydroquinolinyl, dihydroquinolinonyl, dihydroisoquinolinonyl, dihydrocoumarinyl, dihydroisocoumarinyl, isoindolinonyl, benzodioxanyl, benzoxazolinonyl, pyrrolyl N-oxide, pyrimidinyl N-oxide, pyridazinyl N-oxide, pyrazinyl N-oxide, quinolinyl N-oxide, indolyl N-oxide, indolinyl N-oxide, isoquinolyl N-oxide, quinazolinyl N-oxide, quinoxalinyl N-oxide, phthalazinyl N-oxide, imidazolyl N-oxide, isoxazolyl N-oxide, oxazolyl N-oxide, thiazolyl N-oxide, indolizinyl N-oxide, indazolyl N-oxide, benzothiazolyl N-oxide, benzimidazolyl N-oxide, pyrrolyl N-oxide, oxadiazolyl N-oxide, thiadiazolyl N-oxide, triazolyl N-oxide, tetrazolyl N-oxide, benzothiopyranyl S-oxide, benzothiopyranyl S,S-dioxide. Exemplary heteroaryl groups include imidazolyl, pyrazolyl, thiadiazolyl, triazolyl, isoxazolyl, isothiazolyl, imidazolyl, thiazolyl, oxadiazolyl, and pyridyl. Other exemplary heteroaryl groups include 1-pyrrolyl, 2-pyrrolyl, 3-pyrrolyl, 3-pyrazolyl, 2-imidazolyl, 4-imidazolyl, pyrazinyl, 2-oxazolyl, 4-oxazolyl, 2-phenyl-4-oxazolyl, 5-oxazolyl, 3-isoxazolyl, 4-isoxazolyl, 5-isoxazolyl, 2-thiazolyl, 4-thiazolyl, 5-thiazolyl, 2-furyl, 3-furyl, 2-thienyl, 3-thienyl, 2-pyridyl, 3-pyridyl, pyridin-4-yl, 2-pyrimidyl, 4-pyrimidyl, 5-benzothiazolyl, purinyl, 2-benzimidazolyl, 5-indolyl, 1-isoquinolyl, 5-isoquinolyl, 2-quinoxalinyl, 5-quinoxalinyl, 3-quinolyl, and 6-quinolyl. Substituents for each of the above noted aryl and heteroaryl ring systems are selected from the group of acceptable aryl group substituents described below.

[0296] Examples of aliphatic linkers include the following structures: —O—CO—O—; —NH—CO—O—; —NH—CONH—; —NH—(CH₂)ₙ₁—; —S(CH₂)ₙ₁—; —CO—(CH₂)ₙ₁—CO—; CO—(CH₂)ₙ₁—NH—; —NH—(CH₂)ₙ₁—NH—; —CO—NH—(CH₂)ₙ₁—NH—CO—; —C(═S)—NH—(CH₂)ₙ₁—NH—CO—; —C(═S)—NH—(CH₂)ₙ₁—NH—C-(═S); —CO—O—(CH₂)ₙ₁—O—CO; —C(═S)—O—(CH₂)ₙ₁—O—CO—; —C(═S)—O—(CH₂)ₙ₁—O—C(═S)—; —CO—NH—(CH₂)ₙ₁—O—CO—; —C(═S)—NH—(CH₂)ₙ₁—O—CO—; —C(═S)—NH—(CH₂)ₙ₁—O—C(═S)—; —CO—NH—(CH₂)ₙ₁—O—CO—; C(═S)—NH—(CH₂)ₙ₁—CO—; —C(═S)—O—(CH₂)ₙ₁−NH—CO—; —C(═S)—NH—(CH₂)ₙ₁—O—C(═S)—; —NH—(CH₂CH₂O)ₙ₂—CH(CH₂OH)—; —NH—(CH₂CH₂O)ₙ₂—CH₂—; —NH—(CH₂CH₂O)ₙ₂—CH₂—CO—; —O—(CH₂)ₙ₃—S—S—(CH₂)ₙ₄—O—P(═O)₂—; —CO—(CH₂)ₙ₃—O—CO—NH—(CH₂)ₙ₄—; —CO—(CH₂)ₙ₃—CO—NH—(CH₂)ₙ₄—; —(CH₂)ₙ₁NH—; —C(O)(CH2)ₙ₁NH—; —C(O)—(CH2)ₙ₁—C(O)—; —C(O)—(CH2)ₙ₁—C(O)O—; —C(O)—O—; —C(O)—(CH2)ₙ₁—NH—C(O)—; —C(O)—(CH₂)ₙ₁—; —C(O)—NH—; —C(O)—; —(CH2)ₙ₁—C(O)—; —(CH2)ₙ₁—C(O)O—; —(CH2)ₙ₁—; —(CH2)ₙ₁—NH—C(O)—; wherein n1 is an integer between 1 and 40 (e.g., 2 to 20, or 2 to 12); n2 is an integer between 1 and 20 (e.g., 1 to 10, or 1 to 6); n3 and n4 may be the same or different, and are an integer between 1 and 20 (e.g., 1 to 10, or 1 to 6).

[0297] In some aspects, the linker combination comprises (C3)n, (C4)n, (C5)n, (C6)n, (C7)n, or (C8)n, or a combination thereof, wherein n is an integer between 1 and 50, and each unit is connected, e.g., via a phosphate ester linker, a phosphorothioate ester linkage, or a combination thereof.

[0298] II.B.2. Cleavable Linkers

[0299] In some aspects, different components of an ASO disclosed herein can be linker by a cleavable linker. The term cleavable linker refers to a linker comprising at least one linkage or chemical bond that can be broken or cleaved. As used herein, the term cleave refers to the breaking of one or more chemical bonds in a relatively large molecule in a manner that produces two or more relatively smaller molecules. Cleavage may be mediated, e.g., by a nuclease, peptidase, protease, phosphatase, oxidase, or reductase, for example, or by specific physicochemical conditions, e.g., redox environment, pH, presence of reactive oxygen species, or specific wavelengths of light.

[0300] In some aspects, the term “cleavable,” as used herein, refers, e.g., to rapidly degradable linkers, such as, e.g., phosphodiester and disulfides, while the term “non-cleavable” refers, e.g., to more stable linkages, such as, e.g., nuclease-resistant phosphorothioates.

[0301] In some aspects, the cleavable linker is a dinucleotide or trinucleotide linker, a disulfide, an imine, a thioketal, a val-cit dipeptide, or any combination thereof.

[0302] In some aspects, the cleavable linker comprises valine-alanine-p-aminobenzylcarbamate or valine-citrulline-p-aminobenzylcarbamate.

[0303] II.B.2.a. Redox Cleavable Linkers

[0304] In some aspects, the linker combination comprises a redox cleavable linker. As a non-limiting example, one type of cleavable linker is a redox cleavable linking group that is cleaved upon reduction or upon oxidation. In some aspects, the redox cleavable linker contains a disulfide bond, i.e., it is a disulfide cleavable linker. Redox cleavable linkers can be reduced, e.g., by intracellular mercaptans, oxidases, or reductases.

[0305] II.B.2.b. Reactive Oxygen Species (ROS) Cleavable Linkers

[0306] In some aspects, the linker combination can comprise a cleavable linker which may be cleaved by a reactive oxygen species (ROS), such as superoxide (Of) or hydrogen peroxide (H2O2), generated, e.g., by inflammation processes such as activated neutrophils. In some aspects, the ROS cleavable linker is a thioketal cleavable linker. See, e.g., U.S. Pat. No. 8,354,455B2, which is herein incorporated by reference in its entirety.

[0307] II.B.2.c. pH Dependent Cleavable Linkers

[0308] In some aspects, the linker is an “acid labile linker” comprising an acid cleavable linking group, which is a linking group that is selectively cleaved under acidic conditions (pH<7).

[0309] As a non-limiting example, the acid cleavable linking group is cleaved in an acidic environment, e.g., about 6.0, 5.5, 5.0 or less. In some aspects, the pH is about 6.5 or less. In some aspects, the linker is cleaved by an agent such as an enzyme that can act as a general acid, e.g., a peptidase (which may be substrate specific) or a phosphatase. Within cells, certain low pH organelles, such as endosomes and lysosomes, can provide a cleaving environment to the acid cleavable linking group. Although the pH of human serum is 7.4, the average pH in cells is slightly lower, ranging from about 7.1 to 7.3. Endosomes also have an acidic pH, ranging from 5.5 to 6.0, and lysosomes are about 5.0 at an even more acidic pH. Accordingly, pH dependent cleavable linkers are sometimes called endosomically labile linkers in the art.

[0310] The acid cleavable group may have the general formula —C═NN—, C(O)O, or —OC(O). In another non-limiting example, when the carbon attached to the ester oxygen (alkoxy group) is attached to an aryl group, a substituted alkyl group, or a tertiary alkyl group such as dimethyl pentyl or t-butyl, for example. Examples of acid cleavable linking groups include, but are not limited to amine, imine, amino ester, benzoic imine, diortho ester, polyphosphoester, polyphosphazene, acetal, vinyl ether, hydrazone, cis-aconitate, hydrazide, thiocarbamoyl, imizine, azidomethyl-methylmaleic anhydride, thiopropionate, a masked endosomolytic agent, a citraconyl group, or any combination thereof. Disulfide linkages are also susceptible to pH.

[0311] In some aspects, the linker comprises a low pH-labile hydrazone bond. Such acid-labile bonds have been extensively used in the field of conjugates, e.g., antibody-drug conjugates. See, for example, Zhou et al (2011) Biomacromolecules 12:1460-7; Yuan et al (2008) Acta Biomater. 4:1024-37; Zhang et al (2007) Acta Biomater. 6:838-50; Yang et al (2007) J. Pharmacol. Exp. Ther. 321:462-8; Reddy et al (2006) Cancer Chemother. Pharmacol. 58:229-36; Doronina et al (2003) Nature Biotechnol. 21:778-84.

[0312] In certain aspects, the linker comprises a low pH-labile bond selected from the following: ketals that are labile in acidic environments (e.g., pH less than 7, greater than about 4) to form a diol and a ketone; acetals that are labile in acidic environments (e.g., pH less than 7, greater than about 4) to form a diol and an aldehyde; imines or iminiums that are labile in acidic environments (e.g., pH less than 7, greater than about 4) to form an amine and an aldehyde or a ketone; silicon-oxygen-carbon linkages that are labile under acidic condition; silicon-nitrogen (silazane) linkages; silicon-carbon linkages (e.g., arylsilanes, vinylsilanes, and allylsilanes); maleamates (amide bonds synthesized from maleic anhydride derivatives and amines); ortho esters; hydrazones; activated carboxylic acid derivatives (e.g., esters, amides) designed to undergo acid catalyzed hydrolysis); or vinyl ethers.

[0313] Further examples may be found in U.S. Pat. Nos. 9,790,494B2 and 8,137,695B2, the contents of which are incorporated herein by reference in their entireties.

[0314] II.B.2.d. Enzymatic Cleavable Linkers

[0315] In some aspects, the linker combination can comprise a linker cleavable by intracellular or extracellular enzymes, e.g., proteases, esterases, nucleases, amidades. The range of enzymes that can cleave a specific linker in a linker combination depends on the specific bonds and chemical structure of the linker. Accordingly, peptidic linkers can be cleaved, e.g., by peptidades, linkers containing ester linkages can be cleaved, e.g., by esterases; linkers containing amide linkages can be cleaved, e.g., by amidades; etc.

[0316] II.B.2.e. Protease Cleavable Linkers

[0317] In some aspects, the linker combination comprises a protease cleavable linker, i.e., a linker that can be cleaved by an endogenous protease. Only certain peptides are readily cleaved inside or outside cells. See, e.g., Trout et al., 79 Proc. Natl. Acad. Sci. USA, 626-629 (1982) and Umemoto et al. 43 Int. J. Cancer, 677-684 (1989). Cleavable linkers can contain cleavable sites composed of α-amino acid units and peptidic bonds, which chemically are amide bonds between the carboxylate of one amino acid and the amino group of a second amino acid. Other amide bonds, such as the bond between a carboxylate and the α-amino acid group of lysine, are understood not to be peptidic bonds and are considered non-cleavable.

[0318] In some aspects, the protease-cleavable linker comprises a cleavage site for a protease, e.g., neprilysin (CALLA or CDlO), thimet oligopeptidase (TOP), leukotriene A4 hydrolase, endothelin converting enzymes, ste24 protease, neurolysin, mitochondrial intermediate peptidase, interstitial collagenases, collagenases, stromelysins, macrophage elastase, matrilysin, gelatinases, meprins, procollagen C-endopeptidases, procollagen N-endopeptidases, ADAMs and ADAMTs metalloproteinases, myelin associated metalloproteinases, enamelysin, tumor necrosis factor α-converting enzyme, insulysin, nardilysin, mitochondrial processing peptidase, magnolysin, dactylysin-like metalloproteases, neutrophil collagenase, matrix metallopeptidases, membrane-type matrix metalloproteinases, SP2 endopeptidase, prostate specific antigen (PSA), plasmin, urokinase, human fibroblast activation protein (FAPα), trypsin, chymotrypsins, caldecrin, pancreatic elastases, pancreatic endopeptidase, enteropeptidase, leukocyte elastase, myeloblasts, chymases, tryptase, granzyme, stratum corneum chymotryptic enzyme, acrosin, kallikreins, complement components and factors, alternative-complement pathway c3/c5 convertase, mannose-binding protein-associated serine protease, coagulation factors, thrombin, protein c, u and t-type plasminogen activator, cathepsin G, hepsin, prostasin, hepatocyte growth factor-activating endopeptidase, subtilisin/kexin type proprotein convertases, furin, proprotein convertases, prolyl peptidases, acylaminoacyl peptidase, peptidyl-glycaminase, signal peptidase, n-terminal nucleophile aminohydrolases, 20s proteasome, γ-glutamyl transpeptidase, mitochondrial endopeptidase, mitochondrial endopeptidase Ia, htra2 peptidase, matriptase, site 1 protease, legumain, cathepsins, cysteine cathepsins, calpains, ubiquitin isopeptidase T, caspases, glycosylphosphatidylinositoliprotein transamidase, cancer procoagulant, prohormone thiol protease, γ-Glutamyl hydrolase, bleomycin hydrolase, seprase, cathepsin B, cathepsin D, cathepsin L, cathepsin M, proteinase K, pepsins, chymosyn, gastricsin, renin, yapsin and/or mapsins, Prostate-Specific antigen (PSA), or any Asp-N, Glu-C, Lys-C or Arg-C proteases in general. See, e.g., Cancer Res. 77(24):7027-7037 (2017), which is herein incorporated by reference in its entirety.

[0319] In some aspects, the cleavable linker component comprises a peptide comprising one to ten amino acid residues. In these aspects, the peptide allows for cleavage of the linker by a protease, thereby facilitating release of the biologically active molecule upon exposure to intracellular proteases, such as lysosomal enzymes (Doronina et al. (2003) Nat. Biotechnol. 21:778-784). Exemplary peptides include, but are not limited to, dipeptides, tripeptides, tetrapeptides, pentapeptides, and hexapeptides.

[0320] A peptide may comprise naturally-occurring and/or non-natural amino acid residues. The term “naturally-occurring amino acid” refer to Ala, Asp, Cys, Glu, Phe, Gly, His, He, Lys, Leu, Met, Asn, Pro, Gin, Arg, Ser, Thr, Val, Trp, and Tyr. “Non-natural amino acids” (i.e., amino acids do not occur naturally) include, by way of non-limiting example, homoserine, homoarginine, citrulline, phenylglycine, taurine, iodotyrosine, seleno-cysteine, norleucine (“Nle”), norvaline (“Nva”), beta-alanine, L- or D-naphthalanine, ornithine (“Orn”), and the like. Peptides can be designed and optimized for enzymatic cleavage by a particular enzyme, for example, a tumor-associated protease, cathepsin B, C and D, or a plasmin protease.

[0321] Amino acids also include the D-forms of natural and non-natural amino acids. “D-” designates an amino acid having the “D” (dextrorotary) configuration, as opposed to the configuration in the naturally occurring (“L-”) amino acids. Natural and non-natural amino acids can be purchased commercially (Sigma Chemical Co., Advanced Chemtech) or synthesized using methods known in the art. Exemplary dipeptides include, but are not limited to, valine-alanine, valine-citrulline, phenylalanine-lysine, N-methyl-valine-citrulline, cyclohexylalanine-lysine, and beta-alanine-lysine. Exemplary tripeptides include, but are not limited to, glycine-valine-citrulline (gly-val-cit) and glycine-glycine-glycine (gly-gly-gly).

[0322] II.B.2.f. Esterase Cleavable Linkers

[0323] Some linkers are cleaved by esterases (“esterase cleavable linkers”). Only certain esters can be cleaved by esterases and amidases present inside or outside of cells. Esters are formed by the condensation of a carboxylic acid and an alcohol. Simple esters are esters produced with simple alcohols, such as aliphatic alcohols, and small cyclic and small aromatic alcohols. Examples of ester-based cleavable linking groups include, but are not limited to, esters of alkylene, alkenylene and alkynylene groups. The ester cleavable linking group has the general formula —C(O)O— or —OC (O)—.

[0324] II.B.2.g. Phosphatase Cleavable Linkers

[0325] In some aspects, a linker combination can includes a phosphate-based cleavable linking group is cleaved by an agent that degrades or hydrolyzes phosphate groups. An example of an agent that cleaves intracellular phosphate groups is an enzyme such as intracellular phosphatase. Examples of phosphate-based linking groups are —O—P(O)(ORₖ)—O—, —O—P(S)(ORₖ)—O—, —O—P(S)(SRₖ)—O—, —S—P(O)(ORₖ)—O—, —O—P(O)(ORₖ)—S—, —S—P(O)(ORₖ)—S—, —O—P(S)(ORₖ)—S—, —SP (S)(ORₖ)—O—, —OP(O)(Rₖ)—O—, —OP(S)(Rₖ)—O—, —SP(O)(Rₖ)—O—, —SP(S)(Rₖ)—O—, —SP(O)(Rₖ)—S—, or —OP(S)(Rₖ)—S—. In various aspects, Rₖ is any of the following: NH₂, BH₃, CH₃, C₁₋₆ alkyl, C₆₋₁₀ aryl, C₁₋₆ alkoxy and C₆₋₁₀ aryl-oxy. In some aspects, C₁₋₆ alkyl and C₆₋₁₀ aryl are unsubstituted. Further non-limiting examples are —O—P(O)(OH)—O—, —O—P(S)(OH)—O—, —O—P(S)(SH)—O—, —S—P(O)(OH)—O—, O—P(O)(OH)—S—, —S—P(O)(OH)—S—, —O—P(S)(OH)—S—, —S—P(S)(OH)—O—, —O—P(O)(H)—O—, —O—P(S)(H)—O—, —S—P(O)(H)—O—, —SP(S)(H)—O—, —SP(O)(H)—S—, —OP(S)(H)—S—, or —O—P(O)(OH)—O—.

[0326] II.B.2.h. Photoactivated Cleavable Linkers

[0327] In some aspects, the combination linker comprises a photoactivated cleavable linker, e.g., a nitrobenzyl linker or a linker comprising a nitrobenzyl reactive group.

[0328] II.B.2.i. Self-Immolative Linker

[0329] In some aspects, the linker combination comprises a self-immolative linker In some aspects, the self-immolative linker in the EV (e.g., exosome) of the present disclosure undergoes 1,4 elimination after the enzymatic cleavage of the protease-cleavable linker. In some aspects, the self-immolative linker in the EV (e.g., exosome) of the present disclosure undergoes 1,6 elimination after the enzymatic cleavage of the protease-cleavable linker. In some aspects, the self-immolative linker is, e.g., a p-aminobenzyl (pAB) derivative, such as a p-aminobenzyl carbamate (pABC), a p-amino benzyl ether (PABE), a p-amino benzyl carbonate, or a combination thereof. In certain aspects, the self-immolative linker comprises an aromatic group. In some aspects, the aromatic group is selected from the group consisting of benzyl, cinnamyl, naphthyl, and biphenyl. In some aspects, the aromatic group is heterocyclic. In other aspects, the aromatic group comprises at least one substituent. In some aspects, the at least one substituent is selected from the group consisting of F, Cl, I, Br, OH, methyl, methoxy, NO₂, NH₂, NO³⁺, NHCOCH₃, N(CH₃)₂, NHCOCF₃, alkyl, haloalkyl, C₁-C₈ alkylhalide, carboxylate, sulfate, sulfamate, and sulfonate. In other aspects, at least one C in the aromatic group is substituted with N, O, or C—R*, wherein R* is independently selected from H, F, Cl, I, Br, OH, methyl, methoxy, NO₂, NH₂, NO³⁺, NHCOCH₃, N(CH₃)₂, NHCOCF₃, alkyl, haloalkyl, C₁-C₈ alkylhalide, carboxylate, sulfate, sulfamate, and sulfonate.

[0330] In some aspects, the self-immolative linker comprises an aminobenzyl carbamate group (e.g., para-aminobenzyl carbamate), an aminobenzyl ether group, or an aminobenzyl carbonate group. In one aspect, the self-immolative linker is p-amino benzyl carbamate (pABC). pABC is the most efficient and most widespread connector linkage for self-immolative site-specific prodrug activation (see, e.g., Carl et al. J. Med. Chem. 24:479-480 (1981); WO 1981/001145; Rautio et al, Nature Rev. Drug Disc. 7:255-270 (2008); Simplicio et al., Molecules 13:519-547 (2008)).

[0331] In some aspects, the self-immolative linker connects a biologically active molecule (e.g., an ASO) to a protease-cleavable substrate (e.g, Val-Cit). In specific aspects, the carbamate group of a pABC self-immolative linker is connected to an amino group of a biologically active molecule (e.g., ASO), and the amino group of the pABC self-immolative linker is connected to a protease-cleavable substrate.

[0332] The aromatic ring of the aminobenzyl group can optionally be substituted with one or more (e.g., R₁ and/or R₂) substituents on the aromatic ring, which replace a hydrogen that is otherwise attached to one of the four non-substituted carbons that form the ring. As used herein, the symbol “Rₓ” (e.g., R₁, R₂, R₃, R₄) is a general abbreviation that represents a substituent group as described herein. Substituent groups can improve the self-immolative ability of the p-aminobenzyl group (Hay et al., J. Chem Soc., Perkin Trans. 1:2759-2770 (1999); see also, Sykes et al. J. Chem. Soc., Perkin Trans. 1:1601-1608 (2000)).

[0333] Self-immolative elimination can take place, e.g., via 1,4 elimination, 1,6 elimination (e.g., pABC), 1,8 elimination (e.g., p-amino-cinnamyl alcohol), β-elimination, cyclisation-elimination (e.g., 4-aminobutanol ester and ethylenediamines), cyclization/lactonization, cyclization/lactolization, etc. See, e.g., Singh et al. Curr. Med. Chem. 15:1802-1826 (2008); Greenwald et al. J. Med. Chem. 43:475-487 (2000).

[0334] In some aspects, the self-immolative linker can comprise, e.g., cinnamyl, naphthyl, or biphenyl groups (see, e.g., Blencowe et al. Polym. Chem. 2:773-790 (2011)). In some aspects, the self-immolative linker comprises a heterocyclic ring (see, e.g., U.S. Pat. Nos. 7,375,078; 7,754,681). Numerous homoaromatic (see, e.g., Carl et al. J. Med. Chem. 24:479 (1981); Senter et al. J. Org. Chem. 55:2975 (1990); Taylor et al. J. Org. Chem. 43:1197 (1978); Andrianomenjanahary et al. Bioorg. Med. Chem. Lett. 2:1903 (1992)), and coumarin (see, e.g., Weinstein et al. Chem. Commun. 46:553 (2010)), furan, thiophene, thiazole, oxazole, isoxazole, pyrrole, pyrazole (see, e.g., Hay et al. J. Med. Chem. 46:5533 (2003)), pyridine (see, e.g., Perry-Feigenbaum et al. Org. Biomol. Chem. 7:4825 (2009)), imidazone (see, e.g., Nailor et al. Bioorg. Med. Chem. Lett. Z: 1267 (1999); Hay and Denny, Tetrahedron Lett. 38:8425 (1997)), and triazole (see, e.g., Bertrand and Gesson, J. Org. Chem. 72:3596 (2007)) based heteroaromatic groups that are self-immolative under both aqueous and physiological conditions are known in the art. See also, U.S. Pat. Nos. 7,691,962; 7,091,186; U.S. Pat. Publ. Nos. US2006/0269480; US2010/0092496; US2010/0145036; US2003/0130189; US2005/0256030)

[0335] In some aspects, a linker combination disclosed herein comprises more than one self-immolative linker in tandem, e.g., two or more pABC units. See, e.g., de Groot et al. J. Org. Chem. 66:8815-8830 (2001). In some aspects, a linker combination disclosed herein can comprise a self-immolative linker (e.g., a p-aminobenzylalcohol or a hemithioaminal derivative of p-carboxybenzaldehyde or glyoxilic acid) linked to a fluorigenic probe (see, e.g., Meyer et al. Org. Biomol. Chem. 8:1777-1780 (2010)).

[0336] Where substituent groups in the self-immolative linker s are specified by their conventional chemical formulae, written from left to right, they equally encompass the chemically identical substituents, which would result from writing the structure from right to left. For example, “—CH₂O—” is intended to also recite “—OCH₂—”.

[0337] Substituent groups in self-immolative, for example, R₁ and/or R₂ substituents in a p-aminobenzyl self-immolative linker as discuss above can include, e.g., alkyl, alkylene, alkenyl, alkynyl, alkoxy, alkylamino, alkylthio, heteroalkyl, cycloalkyl, heterocycloalkyl, aryl, arylalkyl, aryloxy, heteroaryl, etc. When a compound of the present disclosure includes more than one substituent, then each of the substituents is independently chosen.

[0338] In some specific aspects, the self-immolative linker is attached to cleavable peptide linker has the following formula, the combination having the following formula:

-Aₐ-Y_{y}-

wherein each -A- is independently an amino acid unit, a is independently an integer from 1 to 12; and -Y- is a self-immolative spacer, and y is 1, or 2. In some aspects, -Aₐ- is a dipeptide, a tripeptide, a tetrapeptide, a pentapeptide, or a hexapeptide. In some aspects, -Aₐ- is selected from the group consisting of valine-alanine, valine-citrulline, phenylalanine-lysine, N-methylvaline-citrulline, cyclohexylalanine-lysine, and beta-alanine-lysine. In some aspects, -Aₐ- is valine-alanine or valine-citrulline.

[0339] In some aspects, the self-immolative linker -Y_{y}- has the following formula:

[chemical structure]

wherein each R² is independently C₁₋₈ alkyl, —O—(C₁₋₈ alkyl), halogen, nitro, or cyano; and m is an integer from 0 to 4. In some aspects, m is 0, 1, or 2. In some aspects, m is 0.

[0340] In some aspects, the cleavable linker is valine-alanine-p-aminobenzylcarbamate or valine-citrulline-p-aminobenzylcarbamate.

[0341] I.B.3. Reactive Moieties (RM)

[0342] The ASOs of the present disclosure are generated either via chemical synthesis or via chemical reaction between their components. For example, in some aspects, an anchoring moiety comprising a reactive group (e.g., maleimide) can react with a BAM comprising a maleimide-reacting group, to yield a modified BAM of the present disclosure, where the anchoring moiety may insert into the lipid bilayer of the membrane of an exosome, thereby attaching the BAM to the surface of the exosome.

[0343] Any component or group of components of a modified BAM of the present disclosure can comprise at least a RG and/or an RM, which would allow the attachment of the components through one reaction or series of reactions, to yield a modified BAM of the present disclosure. Exemplary synthesis schemas for the production of modified BAMs include:

[AM]-/RG/+/RM/-[BAM]→[AM]-[BAM]

[AM]-/RM/+/RG/-[BAM]→[AM]-[BAM]

[AM]-[L]-/RM/+/RG/-[BAM]→[AM]-[L]-[BAM]

[AM]-[L]-/RG/+/RM/-[BAM]→[AM]-[L]-[BAM]

[AM]-/RM/+/RG/-[L]-[BAM]→[AM]-[L]-[BAM]

[AM]-/RG/+/RM/-[L]-[BAM]→[AM]-[L]-[BAM]

[AM]-[L]-/RM/+/RG/-[L]-[BAM]→[AM]-[L]-[L]-[BAM]

[AM]-[L]-/RG/+/RM/-[L]-[BAM]→[AM]-[L]-[L]-[BAM]

wherein [AM] is an anchoring moiety, [BAM] is a biologically active molecule, [L] is a linker or linker combination, /RM/ is a reactive moiety, and /RG/ is a reactive group. In any of the schematic representations provided, the BAM can be attached, e.g., via its 5′ end or 3′ end.

[0344] Exemplary synthesis schemas for the production of intermediates in the synthesis of BAMs include:

[AM]-/RM/+/RG/-[L]→[AM]-[L]

[AM]-/RG/+/RM/-[L]→[AM]-[L]

[L]-/RM/+/RG/-[L]→[L]-[L]

[L]-/RG/+/RM/-[L]→[L]-[L]

[L]-/RM/+/RG/-[BAM]→[L]-[BAM]

[L]-/RG/+/RM/-[BAM]→[L]-[BAM]

wherein [AM] is an anchoring moiety, [BAM] is a biologically active molecule, [L] is a linker or linker combination, /RM/ is a reactive moiety, and /RG/ is a reactive group. In any of the schematic representations provided, the BAM can be attached, e.g., via its 5′ end or 3′ end.

[0345] In some aspects, the reactive group “/RG/” can be, e.g., an amino group, a thiol group, a hydroxyl group, a carboxylic acid group, or an azide group. Specific reactive moieties “/RM/” that can react with these reactive groups are described in more detail below.

[AM]-(/RM/)n+(/RG/-[L]-[BAM])n→[AM]-[L]-[BAM]

[0346] Any of the anchoring moieties, linker or linker combinations, or BAM disclosed herein can be conjugated to a reactive moiety, e.g., an amino reactive moiety (e.g., NHS-ester, p-nitrophenol, isothiocyanate, isocyanate, or aldehyde), a thiol reactive moiety (e.g., acrylate, maleimide, or pyridyl disulfide), a hydroxy reactive moiety (e.g., isothiocyanate or isocyanate), a carboxylic acid reactive moiety (e.g., epoxide), or an azide reactive moiety (e.g., alkyne).

[0347] Exemplary reactive moieties that can be used to covalent bind two components disclosed herein (e.g., an anchoring moiety and a BAM, or an anchoring moiety and a linker, or an anchoring moiety and a linker, or two linkers, or a linker and a BAM, or a two anchoring moieties) include, e.g., N-succinimidyl-3-(2-pyridyldithio)propionate, N-4-maleimide butyric acid, S-(2-pyridyldithio)cysteamine, iodoacetoxysuccinimide, N-(4-maleimidebutyryl oxy)succinimide, N-[5-(3′-maleimide propylamide)-1-carboxypentyl]iminodiacetic acid, N-(5-aminopentyl)iminodiacetic acid, and 1′-[(2-cyanoethyl)-(N,N-diisopropyl)]-phosphoramidite). Bifunctional linkers (linkers containing two functional groups) are also usable.

[0348] In some aspects, an anchoring moiety, linker, or BAM can comprise a terminal oxyamino group, e.g., ONH₂, an hydrazino group, NHNH₂, a mercapto group (i.e., SH or thiol), or an olefin (e g. CH═CH₂). In some aspects, an anchoring moiety, linker, or BAM can comprise an electrophilic moiety, e.g., at a terminal position, e.g., an aldehyde, alkyl halide, mesylate, tosylate, nosylate, or brosylate, or an activated carboxylic acid ester, e.g. an NHS ester, a phosphoramidite, or a pentafluorophenyl ester. In some aspects, a covalent bond can be formed by coupling a nucleophilic group of a ligand, e.g., a hydroxyl, a thiol or amino group, with an electrophilic group The present invention is amenable to all manner of reactive groups and reactive moieties including but not limited to those known in the art.

[0349] The term “protecting group,” as used herein, refers to a labile chemical moiety which is known in the art to protect reactive groups including without limitation, hydroxyl amino and thiol groups, against undesired reactions during synthetic procedures. Protecting groups are typically used selectively and/or orthogonally to protect sites during reactions at other reactive sites and can then be removed to leave the unprotected group as is or available for further reactions. Protecting groups as known in the art are described generally in Greene and Wits, Protective Groups in Organic Synthesis, 3rd edition, John Wiley & Sons, New York (1999).

[0350] Additionally, the various synthetic steps may be performed in an alternate sequence or order to give the desired compounds. Synthetic chemistry transformations and protecting group methodologies (protection and deprotection) useful in synthesizing the compounds described herein are known in the art and include, for example, those such as described in R. Larock, Comprehensive Organic Transformations, VCH Publishers (1989), T. W. Greene and P. G. M. Wuts, Protective Groups in Organic Synthesis, 2d Ed, John Wiley and Sons (1991); L. Fieser and M. Fieser, Fieser and Fieser's Reagents for Organic Synthesis, John Wiley and Sons (1994); and L Paquette, ed., Encyclopedia of Reagents for Organic Synthesis, John Wiley and Sons (1995), and subsequent editions thereof.

[0351] Solid phase synthesis known in the art may additionally or alternatively be employed. Suitable solid phase techniques, including automated synthesis techniques, are described in F. Eckstein (ed.), Oligonucleotides and Analogues, a Practical Approach, Oxford University Press, New York (1991) and Toy, P. H.; Lam, Y (ed.), Solid-Phase Organic synthesis, concepts, Strategies, and Applications, John Wiley & Sons, Inc. New Jersey (2012).

[0352] In some aspects, the reactive group can alternatively react with more than one of the reactive moieties described below.

[0353] II.B.3.a. Amine Reactive Moieties

[0354] In some aspects, the reactive moiety is an amine reactive moiety. As used herein the term “amine reactive moiety” refers to a chemical groups which can react with a reactive group having an amino moiety, e.g., primary amines. Exemplary amine reactive moieties are N-hydroxysuccinimide esters (NHS-ester), p-nitrophenol, isothiocyanate, isocyanate, and aldehyde. Alternative reactive moieties that react with primary amines are also well known in the art. In some aspects, an amine reactive moiety can be attached to a terminal position of an anchoring moiety, linker combination, or BAM of the present disclosure.

[0355] In some aspects, the amine reactive moiety is a NHS-ester. Typically, a NHS-ester reactive moiety reacts with a primary amine of a reactive group to yield a stable amide bond and N-hydroxysuccinimide (NHS).

[0356] In some aspects, the amine reactive moiety is a p-nitrophenol group. Typically, a p-nitrophenol reactive moiety is an activated carbamate that reacts with a primary amine of a reactive group to yield a stable carbamate moiety and p-nitrophenol.

[0357] In some aspects, the amine reactive moiety is an isothiocyanate. Typically, a isothiocyanate reacts with a primary amine of a reactive group to yield a stable thiourea moiety.

[0358] In some aspects, the amine reactive moiety is an isocyanate. Typically, a isocyanate reacts with a primary amine of a reactive group to yield a stable urea moiety.

[0359] In some aspects, amine the reactive moiety is an aldehyde. Typically, aldehydes react with primary amines to form Schiff bases which can be further reduced to form a covalent bond through reductive amination.

[0360] II.B.3.b. Thiol Reactive Moieties

[0361] In some aspects, the reactive moiety is a thiol reactive moiety. As used herein the term “thiol reactive moiety” refers to a chemical groups which can react with a reactive group having a thiol moiety (or mercapto group). Exemplary thiol reactive moieties are acrylates, maleimides, and pyridyl disulfides. Alternative reactive moieties that react with thiols are also well known in the art. In some aspects, a thiol reactive moiety can be attached to a terminal position of an anchoring moiety, linker combination, or BAM of the present disclosure.

[0362] In some aspects, the thiol reactive moiety is an acrylate. Typically, acrylates react with thiols at the carbon p to the carbonyl of the acrylate to form a stable sulfide bond. In some aspects, the thiol reactive moiety is a maleimide. Typically, maleimides react with thiols at either of at the carbon p the to the carbonyls to form a stable sulfide bond. In some aspects, the thiol reactive moiety is a pyridyl disulfide. Typically, pyridyl disulfides react with thiols at the sulfur atom p to the pyridyl to form a stable disulfide bond and pyridine-2-thione.

[0363] II.B.3.c. Hydroxy Reactive Moieties

[0364] In some aspects, the reactive moiety is a hydroxyl reactive moiety. As used herein the term “hydroxyl reactive moiety” refers to a chemical group which can react with a reactive group having an hydroxyl moiety. Exemplary hydroxyl reactive moieties are isothiocyanates and isocyanates. Alternative reactive moieties that react with hydroxyl moieties are also well known in the art. In some aspects, a hydroxyl reactive moiety can be attached to a terminal position of an anchoring moiety, linker combination, or BAM of the present disclosure.

[0365] In some aspects, the hydroxyl reactive moiety is an isothiocyanate. Typically, an isothiocyanate reacts with a hydroxyl of a reactive group to yield a stable carbamothioate moiety. In some aspects, amine the reactive moiety is a isocyanate. Typically, an isocyante reacts with a hydroxyl of a reactive group to yield a stable carbamate moiety.

[0366] II.B.3.d. Carboxylic Acid Reactive Moieties

[0367] In some aspects, the reactive moiety is a carboxylic acid reactive moiety. As used herein the term “carboxylic acid reactive moiety” refers to a chemical groups which can react with a reactive group having an carboxylic acid moiety. An exemplary carboxylic acid reactive moieties is an epoxide. Alternative reactive moieties that react with carboxylic acid moieties are also well known in the art. In some aspects, an carboxylic acid reactive moiety can be attached to a terminal position of an anchoring moiety, linker combination, or BAM of the present disclosure.

[0368] In some aspects, the carboxylic acid reactive moiety is an epoxide. Typically, an epoxide reacts with the carboxylic acid of a reactive group at either of the carbon atoms of the epoxide to form a 2-hydroxyethyl acetate moiety.

[0369] II.B.3.e. Azide Reactive Moieties

[0370] In some aspects, the reactive moiety is an azide reactive moiety. As used herein the term “azide reactive moiety” refers to a chemical groups which can react with a reactive group having an azide moiety. An exemplary azide reactive moieties is an alkyne. Alternative reactive moieties that react with azide moieties are also well known in the art. In some aspects, a carboxylic acid reactive moiety can be attached to a terminal position of an anchoring moiety, linker combination, or BAM of the present disclosure.

[0371] In some aspects, the azide reactive moiety is an alkyne. Typically, an alkyne reacts with the azide of a reactive group through a 1,3-dipolar cycloaddition reaction, also referred to “click chemistry,” to form a 1,2,3-triazole moiety.

[0372] II.B.4. Specific Examples and Topologies

[0373] In specific aspects of the present disclosure, the linker combination consists of a linker of formula

[Alkyl linker]m-[PEG1]n-[PEG2]o

wherein m, n, and o are 0 or 1, and at least one of m, n, or o is not zero. Exemplary linker combinations according to such formula are C6-TEG-HEG, C6-HEG, C6-TEG, C6, TEG-HEG, TEG, C8-TEG-HEG, C8-HEG, C8-TEG, and C8.

[0374] In some aspects, the linker combination comprises a non-cleavable linker (e.g., TEG or HEG) in combination with one or more cleavable linkers, e.g., an enzymatic cleavable linker and a self immolative linker.

[0375] In a specific aspect, the linker combination comprises the linker combination TEG (non-cleavable linker)-Val-Cit(cleavable linker)-pAB(self-immolative linker), as shown below

### [Cholesterol]-[TEG]-[Val-Cit]-[pAB]

[chemical structure]

[0377] Specific combinations of anchoring moieties and linker combinations are illustrated in the tables below.

TABLE 1

| | Linker combination | | |
|---|---|---|---|
| Anchoring moiety | 1^{st} Linker | 2^{nd} Linker | 3^{rd} Linker |
| Cholesterol | C6 | TEG | HEG |
| Cholesterol | C6 | HEG | No |
| Cholesterol | C6 | TEG | No |
| Cholesterol | C6 | No | No |
| Cholesterol | TEG | HEG | No |
| Cholesterol | TEG | No | No |
| Tocopherol | C8 | TEG | HEG |
| Tocopherol | C8 | HEG | No |
| Tocopherol | C8 | TEG | No |
| Tocopherol | C8 | No | No |
| Tocopherol | TEG | HEG | No |
| Tocopherol | HEG | No | No |
| Tocopherol | TEG | No | No |
| Tocopherol | No | No | No |
| Palmitate | C6 | TEG | HEG |
| Palmitate | C6 | HEG | No |
| Palmitate | C6 | TEG | No |
| Palmitate | C6 | No | No |
| Cholesterol | TEG | Glycerol | HEG |

TABLE 2
Linker Combination

| Linker 1 | Cleavable Linker 2 | Linker 3 |
|---|---|---|
| C6 | Disulfide | C6 |
| None | Imine | None |
| TEG | Thioketal | TEG |
| HEG | Tri/Dinucleotide | HEG |
| TEG-HEG | Val-Cit | TEG-HEG |

[0378] In some aspects, the linker combination has the general structure [AM]-[Linker1]-[Linker2]-[BAM], wherein the anchoring moiety [AM] is selected from cholesterol, palmitate and tocopherol, the first linker [Linker1] is a hydrophobic linker, and the second linker [Linker2] is a hydrophilic linker. In other aspects, the linker combination has the general structure [AM]-[Linker1]-[Linker2]-[BAM], wherein the anchoring moiety [AM] is selected from cholesterol, palmitate and tocopherol, the first linker [Linker1] is a hydrophilic linker, and the second linker [Linker2] is a hydrophilic linker. In other aspects, In some aspects, the linker combination has the general structure [AM]-[Linker1]-[Linker2]-[ASO], wherein the anchoring moiety [AM] is selected from cholesterol, palmitate and tocopherol, the first linker [Linker1] is selected from a C6 linker, a C8 linker, a TEG linker, and a HEG linker, and the second linker [Linker2] is a hydrophilic linker selected from TEG and HEG.

[0379] In some aspects, the linker combination has the general structure [AM]-[Linker1]-[Linker2]-[Linker3]-[ASO], where in the anchoring moiety [AM] is a lipid (e.g., a phospholipid), the first linker [Linker1] is selected from the group consisting of HEG, TEG, TEG-HEG, and C6, or it is absent, the second linker [Linker2] is selected from the group consisting of disulfide, imine, thioketal, tri/dinucleotide, and Val-Cit, and the third linker [Linker3] is selected from the group consisting of HEG, TEG, TEG-HEG, and C6, or it is absent.

[0380] Specific linker combinations of the present disclosure are exemplified below

### [Cholesterol]-[Teg]-[Heg]-[Bam]

[chemical structure]

### [Cholesterol]-[SMal]-[Val-Cit]-[pAB]-[BAM]

[chemical structure]

### [Cholesterol]-[TEG]-[Val-Cit]-[C6]-[BAM]

[chemical structure]

### [Cholesterol]-[Teg]-[Ss]-[C6]-[Bam]

[chemical structure]

wherein [Cholesterol] is a cholesterol anchoring moiety, [TEG] is a TEG non-cleavable linker, [HEG] is a HEG non-cleavable linker, [SS] is a disulfide redox cleavable linker, [C6] is an alkyl non-cleavable linker, [SMal] is S-maleimide, [Val-Cit] is a valine-citrulline cleavable linker, [pAB] is a pAB self-immolative linker. In some aspects, an ASO of the present disclosure has a structure according to the exemplary structures provided above, in which one or more components has been replaced by a component in the same class as those depicted in the example. For example, the [cholesterol] anchoring moiety can be substituted by another anchoring moiety disclosed herein, a [TEG] can be substituted by another polymeric non-cleavable linker disclosed herein (e.g., HEG, PEG, PG), [Val-Cit] can be replaced by another peptidase cleavable linker, or [pAB] can be substituted by another self-immolative linker.

[0385] Additional specific linker combinations of the present disclosure are exemplified below:

### [Saturated Phospholipid; Ethanolamine; DLPE]-[TEG]-[BAM]

[chemical structure]

### [Unsaturated Phospholipid; Ethanolamine; DOPE]-[BAM]

[chemical structure]

### [Saturated Fatty Acid; Laurate]-[TEG]-[C6]-[BAM]

[chemical structure]

### [Unsaturated Fatty Acid; Linoleate]-[TEG]-[C6]-[BAM]

[chemical structure]

### [Stearate]-[TEG]-[HEG]-[BAM]

[chemical structure]

[0391] II.C Biologically Active Molecule

[0392] In some aspects, an EV (e.g., exosome) disclosed herein is capable of delivering a payload (a biologically active molecule attached to the EV, e.g., exosome, via an anchoring moiety) to a target. The payload is an agent that acts on a target (e.g., a target cell) that is contacted with the EV (e.g., exosome). Contacting can occur in vitro or in a subject. Non-limiting examples of payloads that can attached to an EV (e.g., exosome) via a maleimide moiety include agents such as, nucleotides (e.g., nucleotides comprising a detectable moiety or a toxin or that disrupt transcription), nucleic acids (e.g., DNA or mRNA molecules that encode a polypeptide such as an enzyme, or RNA molecules that have regulatory function such as miRNA, dsDNA, lncRNA, or siRNA), amino acids (e.g., amino acids comprising a detectable moiety or a toxin that disrupt translation), polypeptides (e.g., enzymes), lipids, carbohydrates, and small molecules (e.g., small molecule drugs and toxins). In some aspects, a payload is in the lumen of the EV (e.g., exosome). In some aspects, an EV (e.g., exosome) can comprise more than one payload, e.g., a first payload in solution the lumen of EV (e.g., exosome), and a second payload attached, e.g., to the external surface of the EV (e.g., exosome) via an anchoring moiety.

[0393] In some aspects, the biologically active molecule (payload, BAM) is not naturally occurring with the EV, e.g., exosome. In some aspects, the payload (BAM) is non naturally occurring. In some aspects, the EVs comprising a BAM is non-naturally occurring.

[0394] In some aspects, the payload targets a tumor antigen. Non-limiting examples of tumor antigens include: alpha-fetoprotein (AFP), carcinoembryonic antigen (CEA), epithelial tumor antigen (ETA), mucin 1 (MUC1), Tn-MUC1, mucin 16 (MUC16), tyrosinase, melanoma-associated antigen (MAGE), tumor protein p53 (p53), CD4, CD8, CD45, CD80, CD86, programmed death ligand 1 (PD-L1), programmed death ligand 2 (PD-L2), NY-ESO-1, PSMA, TAG-72, HER2, GD2, cMET, EGFR, Mesothelin, VEGFR, alpha-folate receptor, CE7R, IL-3, Cancer-testis antigen (CTA), MART-1 gp100, TNF-related apoptosis-inducing ligand, or combinations thereof.

[0395] In some aspects, the payload is a small molecule. In some aspects, the small molecule is a proteolysis-targeting chimera (PROTAC).

[0396] In some aspects, the payload comprises a nucleotide, wherein the nucleotide is a stimulator of interferon genes protein (STING) agonist. STING is a cytosolic sensor of cyclic dinucleotides that is typically produced by bacteria. Upon activation, it leads to the production of type I interferons and initiates an immune response

[0397] In some aspects, the EV (e.g., exosome) of the present disclosure comprises one or more STING agonists covalently linked to the EV (e.g., exosome) via an anchoring moiety. In some aspects, the STING agonist comprises a cyclic nucleotide STING agonist or a non-cyclic dinucleotide STING agonist.

[0398] Cyclic purine dinucleotides such as, but not limited to, cGMP, cyclic di-GMP (c-di-GMP), cAMP, cyclic di-AMP (c-di-AMP), cyclic-GMP-AMP (cGAMP), cyclic di-IMP (c-di-IMP), cyclic AMP-IMP (cAIMP), and any analogue thereof, are known to stimulate or enhance an immune or inflammation response in a patient. The CDNs may have 2′2′, 2′3′, 2′5′, 3′3′, or 3′5′ bonds linking the cyclic dinucleotides, or any combination thereof.

[0399] Cyclic purine dinucleotides may be modified via standard organic chemistry techniques to produce analogues of purine dinucleotides. Suitable purine dinucleotides include, but are not limited to, adenine, guanine, inosine, hypoxanthine, xanthine, isoguanine, or any other appropriate purine dinucleotide known in the art. The cyclic dinucleotides may be modified analogues. Any suitable modification known in the art may be used, including, but not limited to, phosphorothioate, biphosphorothioate, fluorinate, and difluorinate modifications.

[0400] Non cyclic dinucleotide agonists may also be used, such as 5,6-Dimethylxanthenone-4-acetic acid (DMXAA), or any other non-cyclic dinucleotide agonist known in the art.

[0401] It is contemplated that any STING agonist may be used. Among the STING agonists are DMXAA, STING agonist-1, ML RR-S2 CDA, ML RR-S2c-di-GMP, ML-RR-S2 cGAMP, 2′3′-c-di-AM(PS)2, 2′3′-cGAMP, 2′3′-cGAMPdFHS, 3′3′-cGAMP, 3′3′-cGAMPdFSH, cAIMP, cAIM(PS)2, 3′3′-cAIMP, 3′3′-cAIMPdFSH, 2′2′-cGAMP, 2′3′-cGAM(PS)2, 3′3′-cGAMP, c-di-AMP, 2′3′-c-di-AMP, 2′3′-c-di-AM(PS)2, c-di-GMP, 2′3′-c-di-GMP, c-di-IMP, c-di-UMP or any combination thereof. In a specific aspect, the STING agonist is 3′3′-cAIMPdFSH, alternatively named 3-3 cAIMPdFSH. Additional STING agonists known in the art may also be used.

[0402] In some aspects, the biologically active molecule is an antibody or antigen binding fragment thereof. In some aspects, the biologically active molecule is an ADC. In some aspects, the biologically active molecule is a small molecule comprising a synthetic antineoplastic agent (e.g., monomethyl auristatin E (MMAE) (vedotin)), a cytokine release inhibitor (e.g., MCC950), an mTOR inhibitor (e.g., Rapamycin and its analogs (Rapalogs)), an autotaxin inhibitor (e.g., PAT409 or PAT505), a lysophosphatidic acid receptor antagonist (e.g., BMS-986020), a STING antagonist (e.g., CL656), or any combination thereof.). In some aspects, the biologically active molecule is a fusogenic peptide.

[0403] In some aspects, the biologically active molecule comprises an antisense oligonucleotide (ASO). In some aspects, the ASO targets various genes (transcripts) expressed in vivo. In some aspects, a biologically active molecule of the present disclosure comprises morpholino backbone structures disclosed in U.S. Pat. No. 5,034,506, which is herein incorporated by reference in its entirety. In some aspects, a biologically active molecule of the present disclosure includes phosphorodiamidate morpholino oligomers (PMO), in which the deoxyribose moiety is replaced by a morpholine ring, and the charged phosphodiester inter-subunit linkage is replaced by an uncharged phosphorodiamidate linkage, as described in Summerton, et al., Antisense Nucleic Acid Drug Dev. 1997, 7:63-70. Thus, in some aspects, the biologically active molecule is an antisense oligonucleotide, a phosphorodiamidate morpholino oligomer (PMO), or a peptide-conjugated phosphorodiamidate morpholino oligomer (PPMO).

[0404] In some aspects, the biologically active molecule targets macrophages. In other aspects, the biologically active molecule induces macrophage polarization. Macrophage polarization is a process by which macrophages adopt different functional programs in response to the signals from their microenvironment. This ability is connected to their multiple roles in the organism: they are powerful effector cells of innate immune system, but also important in removal of cellular debris, embryonic development and tissue repair.

[0405] By simplified classification, macrophage phenotype has been divided into 2 groups: M1 (classically activated macrophages) and M2 (alternatively activated macrophages). This broad classification was based on in vitro studies, in which cultured macrophages were treated with molecules that stimulated their phenotype switching to particular state. In addition to chemical stimulation, it has been shown that the stiffness of the underlying substrate a macrophage is grown on can direct polarization state, functional roles and migration mode. M1 macrophages were described as the pro-inflammatory type, important in direct host-defense against pathogens, such as phagocytosis and secretion of pro-inflammatory cytokines and microbicidal molecules. M2 macrophages were described to have quite the opposite function: regulation of the resolution phase of inflammation and the repair of damaged tissues. Later, more extensive in vitro and ex vivo studies have shown that macrophage phenotypes are much more diverse, overlapping with each other in terms of gene expression and function, revealing that these many hybrid states form a continuum of activation states which depend on the microenvironment. Moreover, in vivo, there is a high diversity in gene expression profile between different populations of tissue macrophages. Macrophage activation spectrum is thus considered to be wider, involving complex regulatory pathway to response to plethora of different signals from the environment. The diversity of macrophage phenotypes still remain to be fully characterized in vivo.

[0406] The imbalance of the macrophage types is related to a number of immunity-related diseases. For example, increased M1/M2 ratio may correlate with development of inflammatory bowel disease, as well as obesity in mice. On the other side, in vitro experiments implicated M2 macrophages as the primary mediators of tissue fibrosis. Several studies have associated the fibrotic profile of M2 macrophages with the pathogenesis of systemic sclerosis. Non-limiting examples of the macrophage targeting biologically active molecules are: PI3Kγ (phosphatidylinositol-4,5-bisphosphate 3-kinase catalytic subunit gamma), RIP1 (Receptor Interacting Protein (RIP) kinase 1, RIPK1), HIF-1α (Hypoxia-inducible factor 1-alpha), AHR1 (Adhesion and hyphal regulator 1), miR146a, miR155, IRF4 (Interferon regulatory factor 4), PPAR7 (Peroxisome proliferator-activated receptor gamma), IL-4RA (Interleukin-4 receptor subunit alpha), TLR8 (Toll-like receptor 8), and TGF-β1 (Transforming growth factor beta-1 proprotein)

[0407] In some aspects, the biologically active molecule targets PI3Kγ protein or transcript (PI3Kγ antagonist). In some aspects, the PI3Kγ antagonist is an antisense oligonucleotide. In other aspects, the PI3Kγ antagonist is a small molecule. In some aspects, the ASO targets a transcript, e.g., mRNA, encoding PI3Kγ. The sequence for the PI3Kγ gene can be found at chromosomal location 7q22.3 and under publicly available GenBank Accession Number NC_000007.14 (106865282 . . . 106908980), which is incorporated by reference in its entirety. The sequence for human PI3Kγ protein can be found under publicly available UniProt Accession Number P48736, which is incorporated by reference herein in its entirety.

[0408] In some aspects, the biologically active molecule targets RIP1 protein or transcript (RIP1 antagonist). In some aspects, the RIP1 antagonist is an antisense oligonucleotide. In other aspects, the RIP1 antagonist is a small molecule. In some aspects, the ASO targets a transcript, e.g., mRNA, encoding RIP1. The sequence for the RIP1 gene can be found at chromosomal location 6p25.2 and under publicly available GenBank Accession Number NC_000006.12 (3063967 . . . 3115187), which is incorporated by reference in its entirety. The sequence for human RIP1 protein can be found under publicly available UniProt Accession Number Q13546, which is incorporated by reference herein in its entirety.

[0409] In some aspects, the biologically active molecule targets HIF-1α protein or transcript (HIF-1α antagonist). In some aspects, the HIF-1α antagonist is an antisense oligonucleotide. In other aspects, the HIF-1α antagonist is a small molecule. In some aspects, the ASO targets a transcript, e.g., mRNA, encoding HIF-1α. The sequence for the HIF-1α gene can be found at chromosomal location 14q23.2 and under publicly available GenBank Accession Number NC_000014.9 (61695513 . . . 61748259), which is incorporated by reference in its entirety. The sequence for human HIF-1α protein can be found under publicly available UniProt Accession Number Q16665, which is incorporated by reference herein in its entirety. In some aspects, the ASO targets a mRNA encoding HIF-2α. The sequence for the HIF-2α gene can be found at chromosomal location 2p21 and under publicly available GenBank Accession Number NC_000002.12 (46297407 . . . 46386697), which is incorporated by reference in its entirety. The sequence for human HIF-2α protein can be found under publicly available UniProt Accession Number Q99814, which is incorporated by reference herein in its entirety

[0410] In some aspects, the biologically active molecule targets AHR1 protein or transcript (AHR1 antagonist). In other aspects, the AHR1 antagonist is a small molecule.

[0411] In some aspects, the biologically active molecule targets miR146a (miR146a antagomir). In some aspects, the miR146a antagomir is an antisense oligonucleotide. In some aspects, the ASO binds to miR146a-5p (ugagaacugaauuccauggguu) (SEQ ID NO:54). In some aspects, the ASO binds to miR146a-3p (ccucugaaauucaguucuucag) (SEQ ID NO:55).

[0412] In some aspects, the biologically active molecule mimics miR155 (miR155 mimic). In some aspects, the miR155 mimic is an RNA or DNA. In some aspects, the miR155 mimic comprises the nucleotide sequence of miR155-5p (uuaaugcuaaucgugauaggggu) (SEQ ID NO:56). In some aspects, the miR155 mimic comprises the nucleotide sequence of miR155-3p (cuccuacauauuagcauuaaca) (SEQ ID NO:57).

[0413] In some aspects, the biologically active molecule targets IRF-4 protein or transcript (IRF4 antagonist). In some aspects, the IRF4 antagonist is an antisense oligonucleotide. In some aspects, the ASO targets a transcript, e.g., mRNA, encoding IRF-4. The sequence for the IRF-4 gene can be found at chromosomal location 6p25.3 and under publicly available GenBank Accession Number NC_000006.12 (391739 . . . 411443), which is incorporated by reference in its entirety. The sequence for human IRF-4 protein can be found under publicly available UniProt Accession Number Q15306, which is incorporated by reference herein in its entirety.

[0414] In some aspects, the biologically active molecule targets PPARγ protein or transcript (PPARγ antagonist). In some aspects, the PPARγ antagonist is an antisense oligonucleotide. In other aspects, the PPARγ antagonist is a small molecule. In some aspects, the ASO targets a transcript, e.g., mRNA, encoding PPARγ. The sequence for the PPARγ gene can be found at chromosomal location 3p25.2 and under publicly available GenBank Accession Number NC_000003.12 (12287485 . . . 12434356), which is incorporated by reference in its entirety. The sequence for human PPARγ protein can be found under publicly available UniProt Accession Number P37231, which is incorporated by reference herein in its entirety.

[0415] In some aspects, the biologically active molecule targets IL-4RA protein or transcript (IL-4RA antagonist). In some aspects, the IL-4RA antagonist is an antisense oligonucleotide. In some aspects, the ASO targets a transcript, e.g., mRNA, encoding IL-4RA. The sequence for the IL-4RA gene can be found at chromosomal location 16p12.1 and under publicly available GenBank Accession Number NC_000016.10 (27313668 . . . 27364778), which is incorporated by reference in its entirety. The sequence for human IL-4RA protein can be found under publicly available UniProt Accession Number P24394, which is incorporated by reference herein in its entirety.

[0416] In some aspects, the biologically active molecule is an agonist of Toll-like receptor 8 (TLR8). TLR8 is also referred to as CD288. TLR8 is a key component of innate and adaptive immunity. TLRs (Toll-like receptors) control host immune response against pathogens through recognition of molecular patterns specific to microorganisms. It acts via MYD88 and TRAF6, leading to NF-kappa-B activation, cytokine secretion and the inflammatory response. The sequence for human TLR8 protein can be found under publicly available UniProt Accession Number Q9NR97, which is incorporated by reference herein in its entirety.

[0417] In some aspects, the biologically active molecule targets TGF-β1 protein or transcript (TGF-β1 antagonist). In some aspects, the TGF-β1 antagonist is an antisense oligonucleotide. In some aspects, the ASO targets a transcript, e.g., mRNA, encoding TGF-β1. The sequence for the TGF-β31 gene can be found at chromosomal location 19q13.2 and under publicly available GenBank Accession Number NC_000019.10 (41330323 . . . 41353922, complement), which is incorporated by reference in its entirety. The sequence for human TGF-β1 protein can be found under publicly available UniProt Accession Number P01137, which is incorporated by reference herein in its entirety.

[0418] In some aspects, the ASO is a gapmer, a mixmer, or a totalmer. The ASO of the disclosure can comprise one or more nucleosides which have a modified sugar moiety, i.e. a modification of the sugar moiety when compared to the ribose sugar moiety found in DNA and RNA. Numerous nucleosides with modification of the ribose sugar moiety have been made, primarily with the aim of improving certain properties of oligonucleotides, such as affinity and/or nuclease resistance.

[0419] Such modifications include those where the ribose ring structure is modified, e.g. by replacement with a hexose ring (HNA), or a bicyclic ring, which typically have a biradical bridge between the C2′ and C4′ carbons on the ribose ring (LNA), or an unlinked ribose ring which typically lacks a bond between the C2′ and C3′ carbons (e.g., UNA). Other sugar modified nucleosides include, for example, bicyclohexose nucleic acids (WO2011/017521) or tricyclic nucleic acids (WO2013/154798). Modified nucleosides also include nucleosides where the sugar moiety is replaced with a non-sugar moiety, for example in the case of peptide nucleic acids (PNA), or morpholino nucleic acids.

[0420] Sugar modifications also include modifications made via altering the substituent groups on the ribose ring to groups other than hydrogen, or the 2′-OH group naturally found in RNA nucleosides. Substituents may, for example be introduced at the 2′, 3′, 4′, or 5′ positions. Nucleosides with modified sugar moieties also include 2′ modified nucleosides, such as 2′ substituted nucleosides. Indeed, much focus has been spent on developing 2′ substituted nucleosides, and numerous 2′ substituted nucleosides have been found to have beneficial properties when incorporated into oligonucleotides, such as enhanced nucleoside resistance and enhanced affinity.

[0421] A 2′ sugar modified nucleoside is a nucleoside which has a substituent other than H or —OH at the 2′ position (2′ substituted nucleoside) or comprises a 2′ linked biradical, and includes 2′ substituted nucleosides and LNA (2′-4′ biradical bridged) nucleosides. For example, the 2′ modified sugar may provide enhanced binding affinity (e.g., affinity enhancing 2′ sugar modified nucleoside) and/or increased nuclease resistance to the oligonucleotide. Examples of 2′ substituted modified nucleosides are 2′-O-alkyl-RNA, 2′-O-methyl-RNA, 2′-alkoxy-RNA, 2′-O-methoxyethyl-RNA (MOE), 2′-amino-DNA, 2′-Fluoro-RNA, 2′-Fluro-DNA, arabino nucleic acids (ANA), and 2′-Fluoro-ANA nucleoside. For further examples, please see, e.g., Freier & Altmann; Nucl. Acid Res., 1997, 25, 4429-4443; Uhlmann, Curr. Opinion in Drug Development, 2000, 3(2), 293-213; and Deleavey and Damha, Chemistry and Biology 2012, 19, 937. Below are illustrations of some 2′ substituted modified nucleosides.

[chemical structure]

[0422] LNA nucleosides are modified nucleosides which comprise a linker group (referred to as a biradical or a bridge) between C2′ and C4′ of the ribose sugar ring of a nucleoside (i.e., 2′-4′ bridge), which restricts or locks the conformation of the ribose ring. These nucleosides are also termed bridged nucleic acid or bicyclic nucleic acid (BNA) in the literature. The locking of the conformation of the ribose is associated with an enhanced affinity of hybridization (duplex stabilization) when the LNA is incorporated into an oligonucleotide for a complementary RNA or DNA molecule. This can be routinely determined by measuring the melting temperature of the oligonucleotide/complement duplex.

[0423] Non limiting, exemplary LNA nucleosides are disclosed in WO 99/014226, WO 00/66604, WO 98/039352, WO 2004/046160, WO 00/047599, WO 2007/134181, WO 2010/077578, WO 2010/036698, WO 2007/090071, WO 2009/006478, WO 2011/156202, WO 2008/154401, WO 2009/067647, WO 2008/150729, Morita et al., Bioorganic & Med. Chem. Lett. 12, 73-76, Seth et al., J. Org. Chem. 2010, Vol 75(5) pp. 1569-81, and Mitsuoka et al., Nucleic Acids Research 2009, 37(4), 1225-1238. In some aspects, the modified nucleoside or the LNA nucleosides of the ASO of the disclosure has a general structure of the formula I or II:

[chemical structure]

wherein

[0424] W is selected from —O—, —S—, —N(R^{a})—, —C(R^{a}R^{b})—, in particular —O—;

[0425] B is a nucleobase or a modified nucleobase moiety;

[0426] Z is an internucleoside linkage to an adjacent nucleoside or a 5′-terminal group;

[0427] Z* is an internucleoside linkage to an adjacent nucleoside or a 3′-terminal group;

[0428] R¹, R², R³, R⁵ and R^{5*} are independently selected from hydrogen, halogen, alkyl, alkenyl, alkynyl, hydroxy, alkoxy, alkoxyalkyl, alkenyloxy, carboxyl, alkoxycarbonyl, alkylcarbonyl, formyl, azide, heterocycle and aryl; and

[0429] X, Y, R^{a} and R^{b} are as defined herein.

[0430] II.C.1. ASO Targeting NLRP3

[0431] NLRP3 (NLRP3) is also known as NLR family pyrin domain containing 3. Unless indicated otherwise, the term “NLRP3,” as used herein, can refer to NLRP3 from one or more species (e.g., humans, non-human primates, dogs, cats, guinea pigs, rabbits, rats, mice, horses, cattle, and bears). Synonyms of NLRP3/NLRP3 are known and include NLRP3; C1orf7; CIAS1; NALP3; PYPAF1; nucleotide-binding oligomerization domain, leucine rich repeat and pyrin domain containing 3; cold-induced autoinflammatory syndrome 1 protein; cryopyin; NACHT, LRR and PYD domains-containing protein 3; angiotensin/vasopressin receptor AII/AVP-like; caterpiller protein 1.1; CLR1.1; cold-induced autoinflammatory syndrome 1 protein; and PYRIN-containing APAF1-like protein 1. The sequence for the human NLRP3 gene can be found under publicly available GenBank Accession Number NC_000001.11:247416156-247449108. The human NLRP3 gene is found at chromosome location 1q44 at 247,416,156-247,449,108.

[0432] The sequence for the human NLRP3 pre-mRNA transcript (SEQ ID NO: 1) corresponds to the reverse complement of residues 247,416,156-247,449,108 of chromosome 1q44. The NLRP3 mRNA sequence (GenBank Accession No. NM_001079821.2) is provided in SEQ ID NO: 3, except that the nucleotide “t” in SEQ ID NO: 3 is shown as “u” in the mRNA. The sequence for human NLRP3 protein can be found under publicly available Accession Numbers: Q96P20, (canonical sequence, SEQ ID NO: 2), Q96P20-2 (SEQ ID NO: 4), Q96P20-3 (SEQ ID NO: 5), Q96P20-4 (SEQ ID NO: 6), Q96P20-5 (SEQ ID NO: 7), and Q96P20-6 (SEQ ID NO: 8), each of which is incorporated by reference herein in its entirety.

[0433] Natural variants of the human NLRP3 gene product are known. For example, natural variants of human NLRP3 protein can contain one or more amino acid substitutions selected from: D21H, I174T, V200M, R262L, 4262P, R262W, L266H, D305G, D305N, L307P, Q308K, F311S, T350M, A354V, L355P, E356D, H360R, T407P, T4381, T438N, A441T, A441V, R490K, F525C, F525L, G571R, Y572C, F575S, E629G, L634F, M664T, Q705K, Y861C, and R920Q, and any combinations thereof. Additional variants of human NLRP3 protein resulting from alternative splicing are also known in the art. NLRP3 Isoform 1 (identifier: Q96P20-2 at UniProt) differs from the canonical sequence (SEQ ID NO: 3) as follows: deletion of residues 721-777 and 836-892 relative to SEQ ID NO: 3. The sequence of NLRP3 Isoform 3 (identifier: Q96P20-3) differs from the canonical sequence (SEQ ID NO: 3) as follows: deletion of residues 720-1036 relative to SEQ ID NO: 3. The sequence of NLRP3 Isoform 4 (identifier: Q96P20-4) differs from the canonical sequence (SEQ ID NO: 3) as follows: deletion of residues 721-777 relative to SEQ ID NO: 3. The sequence of NLRP3 Isoform 5 (identifier: Q96P20-5) differs from the canonical sequence (SEQ ID NO: 3) as follows: deletion of residues 836-892 relative to SEQ ID NO: 3. The sequence of NLRP3 Isoform 6 (identifier: Q96P20-6) differs from the canonical sequence (SEQ ID NO: 3) as follows: deletion of residues 776-796 relative to SEQ ID NO: 3. Therefore, the ASOs of the present disclosure can be designed to reduce or inhibit expression of the natural variants of the NLRP3 protein.

[0434] An example of a target nucleic acid sequence of the ASOs is NLRP3 pre-mRNA. SEQ ID NO: 1 represents a human NLRP3 genomic sequence (i.e., reverse complement of nucleotides 247,416,156-247,449,108 of chromosome 1q44). SEQ ID NO: 1 is identical to a NLRP3 pre-mRNA sequence except that nucleotide “t” in SEQ ID NO: 1 is shown as “u” in pre-mRNA. In certain aspects, the “target nucleic acid” comprises an intron of a NLRP3 protein-encoding nucleic acids or naturally occurring variants thereof, and RNA nucleic acids derived therefrom, e.g., pre-mRNA. In other aspects, the target nucleic acid comprises an exon region of a NLRP3 protein-encoding nucleic acids or naturally occurring variants thereof, and RNA nucleic acids derived therefrom, e.g., pre-mRNA. In yet other aspects, the target nucleic acid comprises an exon-intron junction of a NLRP3 protein-encoding nucleic acids or naturally occurring variants thereof, and RNA nucleic acids derived therefrom, e.g., pre-mRNA. In some aspects, for example when used in research or diagnostics the “target nucleic acid” can be a cDNA or a synthetic oligonucleotide derived from the above DNA or RNA nucleic acid targets. The human NLRP3 protein sequence encoded by the NLRP3 pre-mRNA is shown as SEQ ID NO: 3. In other aspects, the target nucleic acid comprises an untranslated region of a NLRP3 protein-encoding nucleic acids or naturally occurring variants thereof, e.g., 5′ UTR, 3′ UTR, or both.

[0435] In some aspects, an ASO of the disclosure hybridizes to a region within the introns of a NLRP3 transcript, e.g., SEQ ID NO: 1. In certain aspects, an ASO of the disclosure hybridizes to a region within the exons of a NLRP3 transcript, e.g., SEQ ID NO: 1. In other aspects, an ASO of the disclosure hybridizes to a region within the exon-intron junction of a NLRP3 transcript, e.g., SEQ ID NO: 1. In some aspects, an ASO of the disclosure hybridizes to a region within a NLRP3 transcript (e.g., an intron, exon, or exon-intron junction), e.g., SEQ ID NO: 1, wherein the ASO has a design according to formula: 5′ A-B-C 3′ as described elsewhere herein.

[0436] In some aspects, the ASO targets a mRNA encoding a particular isoform of NLRP3 protein (e.g., Isoform 1). In some aspects, the ASO targets all isoforms of NLRP3 protein. In other aspects, the ASO targets two isoforms (e.g., Isoform 1 and Isoform 2, Isoform 3 and Isoform 4, and Isoform 5 and Isoform 6) of NLRP3 protein.

[0437] In some aspects, the nucleotide sequence of the ASOs of the disclosure or the contiguous nucleotide sequence has at least about 80% sequence identity to a sequence selected from SEQ ID NOs: 101 to 200 (i.e., the sequences in FIG. 1A), such as at least about 80%, at least about 85%, at least about 90%, at least about 91%, at least about 92%, at least about 93%, at least about 94%, at least about 95%, at least about 96% sequence identity, at least about 97% sequence identity, at least about 98% sequence identity, at least about 99% sequence identity, such as about 100% sequence identity (homologous). In some aspects, the ASO has a design described elsewhere herein or a chemical structure shown elsewhere herein (e.g., FIG. 1A).

[0438] In some aspects the ASO (or contiguous nucleotide portion thereof) is selected from, or comprises, one of the sequences selected from the group consisting of SEQ ID NOs: 101 to 200 or a region of at least 10 contiguous nucleotides thereof, wherein the ASO (or contiguous nucleotide portion thereof) can optionally comprise one, two, three, or four mismatches when compared to the corresponding NLRP3 transcript.

[0439] In some aspects, the ASO comprises a sequence selected from the group consisting of SEQ ID NO: 101, SEQ ID NO: 102, SEQ ID NO: 103, SEQ ID NO: 104, SEQ ID NO: 105, SEQ ID NO: 106, SEQ ID NO: 107, SEQ ID NO: 108, SEQ ID NO: 109, SEQ ID NO: 110, SEQ ID NO: 111, SEQ ID NO: 112, SEQ ID NO: 113, SEQ ID NO: 114, SEQ ID NO: 115, SEQ ID NO: 116, SEQ ID NO: 117, SEQ ID NO: 118, SEQ ID NO: 119, SEQ ID NO: 120, SEQ ID NO: 121, SEQ ID NO: 122, SEQ ID NO: 123, SEQ ID NO: 124, SEQ ID NO: 125, SEQ ID NO: 126, SEQ ID NO: 127, SEQ ID NO: 128, SEQ ID NO: 129, SEQ ID NO: 130, SEQ ID NO: 131, SEQ ID NO: 132, SEQ ID NO: 133, SEQ ID NO: 134, SEQ ID NO: 135, SEQ ID NO: 136, SEQ ID NO: 137, SEQ ID NO: 138, SEQ ID NO: 139, SEQ ID NO: 140, SEQ ID NO: 141, SEQ ID NO: 142, SEQ ID NO: 143, SEQ ID NO: 144, SEQ ID NO: 145, SEQ ID NO: 146, SEQ ID NO: 147, SEQ ID NO: 148, SEQ ID NO: 149, SEQ ID NO: 150, SEQ ID NO: 151, SEQ ID NO: 152, SEQ ID NO: 153, SEQ ID NO: 154, SEQ ID NO: 155, SEQ ID NO: 156, SEQ ID NO: 157, SEQ ID NO: 158, SEQ ID NO: 159, SEQ ID NO: 160, SEQ ID NO: 161, SEQ ID NO: 162, SEQ ID NO: 163, SEQ ID NO: 164, SEQ ID NO: 165, SEQ ID NO: 166, SEQ ID NO: 167, SEQ ID NO: 168, SEQ ID NO: 169, SEQ ID NO: 170, SEQ ID NO: 171, SEQ ID NO: 172, SEQ ID NO: 173, SEQ ID NO: 174, SEQ ID NO: 175, SEQ ID NO: 176, SEQ ID NO: 177, SEQ ID NO: 178, SEQ ID NO: 179, SEQ ID NO: 180, SEQ ID NO: 181, SEQ ID NO: 182, SEQ ID NO: 183, SEQ ID NO: 184, SEQ ID NO: 185, SEQ ID NO: 186, SEQ ID NO: 187, SEQ ID NO: 188, SEQ ID NO: 189, SEQ ID NO: 190, SEQ ID NO: 191, SEQ ID NO: 192, SEQ ID NO: 193, SEQ ID NO: 194, SEQ ID NO: 195, SEQ ID NO: 196, SEQ ID NO: 197, SEQ ID NO: 198, SEQ ID NO: 199, or SEQ ID NO: 200.

[0440] In some aspects, the ASO comprises the sequence as set forth in SEQ ID NO: 101. In some aspects, the ASO comprises the sequence as set forth in SEQ ID NO: 102. In some aspects, the ASO comprises the sequence as set forth in SEQ ID NO: 103. In some aspects, the ASO comprises the sequence as set forth in SEQ ID NO: 104. In some aspects, the ASO comprises the sequence as set forth in SEQ ID NO: 105. In some aspects, the ASO comprises the sequence as set forth in SEQ ID NO: 106. In some aspects, the ASO comprises the sequence as set forth in SEQ ID NO: 107. In some aspects, the ASO comprises the sequence as set forth in SEQ ID NO: 108. In some aspects, the ASO comprises the sequence as set forth in SEQ ID NO: 109. In some aspects, the ASO comprises the sequence as set forth in SEQ ID NO: 110. In some aspects, the ASO comprises the sequence as set forth in SEQ ID NO: 111. In some aspects, the ASO comprises the sequence as set forth in SEQ ID NO: 112. In some aspects, the ASO comprises the sequence as set forth in SEQ ID NO: 113. In some aspects, the ASO comprises the sequence as set forth in SEQ ID NO: 114. In some aspects, the ASO comprises the sequence as set forth in SEQ ID NO: 115. In some aspects, the ASO comprises the sequence as set forth in SEQ ID NO: 116. In some aspects, the ASO comprises the sequence as set forth in SEQ ID NO: 117. In some aspects, the ASO comprises the sequence as set forth in SEQ ID NO: 118. In some aspects, the ASO comprises the sequence as set forth in SEQ ID NO: 119. In some aspects, the ASO comprises the sequence as set forth in SEQ ID NO: 120. In some aspects, the ASO comprises the sequence as set forth in SEQ ID NO: 121. In some aspects, the ASO comprises the sequence as set forth in SEQ ID NO: 122. In some aspects, the ASO comprises the sequence as set forth in SEQ ID NO: 123. In some aspects, the ASO comprises the sequence as set forth in SEQ ID NO: 124. In some aspects, the ASO comprises the sequence as set forth in SEQ ID NO: 125. In some aspects, the ASO comprises the sequence as set forth in SEQ ID NO: 126. In some aspects, the ASO comprises the sequence as set forth in SEQ ID NO: 127. In some aspects, the ASO comprises the sequence as set forth in SEQ ID NO: 128. In some aspects, the ASO comprises the sequence as set forth in SEQ ID NO: 129. In some aspects, the ASO comprises the sequence as set forth in SEQ ID NO: 130. In some aspects, the ASO comprises the sequence as set forth in SEQ ID NO: 131. In some aspects, the ASO comprises the sequence as set forth in SEQ ID NO: 132. In some aspects, the ASO comprises the sequence as set forth in SEQ ID NO: 133. In some aspects, the ASO comprises the sequence as set forth in SEQ ID NO: 134. In some aspects, the ASO comprises the sequence as set forth in SEQ ID NO: 135. In some aspects, the ASO comprises the sequence as set forth in SEQ ID NO: 136. In some aspects, the ASO comprises the sequence as set forth in SEQ ID NO: 137. In some aspects, the ASO comprises the sequence as set forth in SEQ ID NO: 138. In some aspects, the ASO comprises the sequence as set forth in SEQ ID NO: 139. In some aspects, the ASO comprises the sequence as set forth in SEQ ID NO: 140. In some aspects, the ASO comprises the sequence as set forth in SEQ ID NO: 141. In some aspects, the ASO comprises the sequence as set forth in SEQ ID NO: 142. In some aspects, the ASO comprises the sequence as set forth in SEQ ID NO: 143. In some aspects, the ASO comprises the sequence as set forth in SEQ ID NO: 144. In some aspects, the ASO comprises the sequence as set forth in SEQ ID NO: 145. In some aspects, the ASO comprises the sequence as set forth in SEQ ID NO: 146. In some aspects, the ASO comprises the sequence as set forth in SEQ ID NO: 147. In some aspects, the ASO comprises the sequence as set forth in SEQ ID NO: 148. In some aspects, the ASO comprises the sequence as set forth in SEQ ID NO: 149. In some aspects, the ASO comprises the sequence as set forth in SEQ ID NO: 150. In some aspects, the ASO comprises the sequence as set forth in SEQ ID NO: 151. In some aspects, the ASO comprises the sequence as set forth in SEQ ID NO: 152. In some aspects, the ASO comprises the sequence as set forth in SEQ ID NO: 153. In some aspects, the ASO comprises the sequence as set forth in SEQ ID NO: 154. In some aspects, the ASO comprises the sequence as set forth in SEQ ID NO: 155. In some aspects, the ASO comprises the sequence as set forth in SEQ ID NO: 156. In some aspects, the ASO comprises the sequence as set forth in SEQ ID NO: 157. In some aspects, the ASO comprises the sequence as set forth in SEQ ID NO: 158. In some aspects, the ASO comprises the sequence as set forth in SEQ ID NO: 159. In some aspects, the ASO comprises the sequence as set forth in SEQ ID NO: 160. In some aspects, the ASO comprises the sequence as set forth in SEQ ID NO: 161. In some aspects, the ASO comprises the sequence as set forth in SEQ ID NO: 162. In some aspects, the ASO comprises the sequence as set forth in SEQ ID NO: 163. In some aspects, the ASO comprises the sequence as set forth in SEQ ID NO: 164. In some aspects, the ASO comprises the sequence as set forth in SEQ ID NO: 165. In some aspects, the ASO comprises the sequence as set forth in SEQ ID NO: 166. In some aspects, the ASO comprises the sequence as set forth in SEQ ID NO: 167. In some aspects, the ASO comprises the sequence as set forth in SEQ ID NO: 168. In some aspects, the ASO comprises the sequence as set forth in SEQ ID NO: 169. In some aspects, the ASO comprises the sequence as set forth in SEQ ID NO: 170. In some aspects, the ASO comprises the sequence as set forth in SEQ ID NO: 171. In some aspects, the ASO comprises the sequence as set forth in SEQ ID NO: 172. In some aspects, the ASO comprises the sequence as set forth in SEQ ID NO: 173. In some aspects, the ASO comprises the sequence as set forth in SEQ ID NO: 174. In some aspects, the ASO comprises the sequence as set forth in SEQ ID NO: 175. In some aspects, the ASO comprises the sequence as set forth in SEQ ID NO: 176. In some aspects, the ASO comprises the sequence as set forth in SEQ ID NO: 177. In some aspects, the ASO comprises the sequence as set forth in SEQ ID NO: 178. In some aspects, the ASO comprises the sequence as set forth in SEQ ID NO: 179. In some aspects, the ASO comprises the sequence as set forth in SEQ ID NO: 180. In some aspects, the ASO comprises the sequence as set forth in SEQ ID NO: 181. In some aspects, the ASO comprises the sequence as set forth in SEQ ID NO: 182. In some aspects, the ASO comprises the sequence as set forth in SEQ ID NO: 183. In some aspects, the ASO comprises the sequence as set forth in SEQ ID NO: 184. In some aspects, the ASO comprises the sequence as set forth in SEQ ID NO: 185. In some aspects, the ASO comprises the sequence as set forth in SEQ ID NO: 186. In some aspects, the ASO comprises the sequence as set forth in SEQ ID NO: 187. In some aspects, the ASO comprises the sequence as set forth in SEQ ID NO: 188. In some aspects, the ASO comprises the sequence as set forth in SEQ ID NO: 189. In some aspects, the ASO comprises the sequence as set forth in SEQ ID NO: 190. In some aspects, the ASO comprises the sequence as set forth in SEQ ID NO: 191. In some aspects, the ASO comprises the sequence as set forth in SEQ ID NO: 192. In some aspects, the ASO comprises the sequence as set forth in SEQ ID NO: 193. In some aspects, the ASO comprises the sequence as set forth in SEQ ID NO: 194. In some aspects, the ASO comprises the sequence as set forth in SEQ ID NO: 195. In some aspects, the ASO comprises the sequence as set forth in SEQ ID NO: 196. In some aspects, the ASO comprises the sequence as set forth in SEQ ID NO: 197. In some aspects, the ASO comprises the sequence as set forth in SEQ ID NO: 198. In some aspects, the ASO comprises the sequence as set forth in SEQ ID NO: 199. In some aspects, the ASO comprises the sequence as set forth in SEQ ID NO: 200.

[0441] In some aspects the ASO comprises or consists of a sequence at least about 60%, at least about 65%, at least about 70%, at least about 75%, at least about 80%, at least about 85%, at least about 90%, at least about 95%, at least about 96%, at least about 97%, at least about 98%, at least about 99%, or about 100% identical to a sequence set forth in SEQ ID NOs: 101 to 200. In some aspects the ASO (or contiguous nucleotide portion thereof) is selected from, or comprises, one of the sequences selected from the group consisting of SEQ ID NOs: 101 to 200 or a region of at least 8, 9, 10, 11, 12, 13, 14, 15, 16, 17, 18, 19, or 20 contiguous nucleotides thereof. In some aspects the ASO (or contiguous nucleotide portion thereof) is selected from, or comprises, one of the sequences selected from the group consisting of SEQ ID NOs: 101 to 200 or a region of at least 8, 9, 10, 11, 12, 13, 14, 15, 16, 17, 18, 19, or 20 contiguous nucleotides thereof, wherein the ASO (or contiguous nucleotide portion thereof) can optionally comprise one, two, three, or four mismatches when compared to the corresponding NLRP3 transcript. In some aspects the ASO (or contiguous nucleotide portion thereof) is selected from, or comprises, one of the sequences selected from the group consisting of SEQ ID NOs: 101 to 200 except for 1, 2, 3, 4, 5, 6, 7, 8, 9 or 10 substitutions, wherein the substituted ASO can bind to the NLRP3 transcript. In some aspects the ASO (or contiguous nucleotide portion thereof) is selected from, or comprises, one of the sequences selected from the group consisting of SEQ ID NOs: 101 to 200 or a region of at least 8, 9, 10, 11, 12, 13, 14, 15, 16, 17, 18, 19, or 20 contiguous nucleotides thereof, wherein the ASO (or contiguous nucleotide portion thereof) can optionally comprise one, two, three, or four additional 5′ and/or 3′ nucleotides complementary to the corresponding NLRP3 transcript.

[0442] In some aspects, binding of an ASO targeting a NLRP3 transcript disclosed herein to a mRNA transcript encoding NLRP3 can reduce expression levels and/or activity levels of NLRP3.

[0443] II.C2. ASO Targeting STAT6

[0444] STAT6 (STAT6) is also known as signal transducer and activator of transcription 6. Synonyms of STAT6/STAT6 are known and include IL-4 STAT; STAT, Interleukin4-Induced; Transcription Factor IL-4 STAT; STAT6B; STAT6C; and D12S1644. The sequence for the human STAT6 gene can be found under publicly available GenBank Accession Number NC_000012.12:c57111413-57095404. The human STAT6 gene is found at chromosome location 12q13.3 at 57111413-57095404, complement. Unless indicated otherwise, the term “STAT6,” as used herein, can refer to STAT6 from one or more species (e.g., humans, non-human primates, dogs, cats, guinea pigs, rabbits, rats, mice, horses, cattle, and bears).

[0445] The sequence for the human STAT6 pre-mRNA transcript (SEQ ID NO: 11) corresponds to the reverse complement of residues 57111413-57095404, complement, of chromosome 12q13.3. The STAT6 mRNA sequence (GenBank Accession No. NM_001178078.1) is provided in SEQ ID NO: 13, except that the nucleotide “t” in SEQ ID NO: 13 is shown as “u” in the mRNA. The sequence for human STAT6 protein can be found under publicly available Accession Numbers: P42226-1, (canonical sequence, SEQ ID NO: 12), P42226-2 (SEQ ID NO: 14), and P42226-3 (SEQ ID NO: 15), each of which is incorporated by reference herein in its entirety.

[0446] Natural variants of the human STAT6 gene product are known. For example, natural variants of human STAT6 protein can contain one or more amino acid substitutions selected from: M118R, D419N, and any combination thereof. Additional variants of human STAT6 protein resulting from alternative splicing are also known in the art. STAT6 Isoform 2 (identifier: P42226-2 at UniProt) differs from the canonical sequence (SEQ ID NO: 13) as follows: deletion of residues 1-174 and substitution of ₁₇₅PSE₁₇₇ with ₁₇₅MEQ₁₇₇ relative to SEQ ID NO: 13. The sequence of STAT6 Isoform 3 (identifier: P42226-3) differs from the canonical sequence (SEQ ID NO: 13) as follows: deletion of residues 1-110 relative to SEQ ID NO: 13. Therefore, the ASOs of the present disclosure can be designed to reduce or inhibit expression of the natural variants of the STAT6 protein.

[0447] An example of a target nucleic acid sequence of the ASOs is STAT6 pre-mRNA. SEQ ID NO: 11 represents a human STAT6 genomic sequence (i.e., reverse complement of nucleotides 57111413-57095404, complement, of chromosome 12q13.3). SEQ ID NO: 11 is identical to a STAT6 pre-mRNA sequence except that nucleotide “t” in SEQ ID NO: 11 is shown as “u” in pre-mRNA. In certain aspects, the “target nucleic acid” comprises an intron of a STAT6 protein-encoding nucleic acids or naturally occurring variants thereof, and RNA nucleic acids derived therefrom, e.g., pre-mRNA. In other aspects, the target nucleic acid comprises an exon region of a STAT6 protein-encoding nucleic acids or naturally occurring variants thereof, and RNA nucleic acids derived therefrom, e.g., pre-mRNA. In yet other aspects, the target nucleic acid comprises an exon-intron junction of a STAT6 protein-encoding nucleic acids or naturally occurring variants thereof, and RNA nucleic acids derived therefrom, e.g., pre-mRNA. In some aspects, for example when used in research or diagnostics the “target nucleic acid” can be a cDNA or a synthetic oligonucleotide derived from the above DNA or RNA nucleic acid targets. The human STAT6 protein sequence encoded by the STAT6 pre-mRNA is shown as SEQ ID NO: 13. In other aspects, the target nucleic acid comprises an untranslated region of a STAT6 protein-encoding nucleic acids or naturally occurring variants thereof, e.g., 5′ UTR, 3′ UTR, or both.

[0448] In some aspects, an ASO of the disclosure hybridizes to a region within the introns of a STAT6 transcript, e.g., SEQ ID NO: 11. In certain aspects, an ASO of the disclosure hybridizes to a region within the exons of a STAT6 transcript, e.g., SEQ ID NO: 11. In other aspects, an ASO of the disclosure hybridizes to a region within the exon-intron junction of a STAT6 transcript, e.g., SEQ ID NO: 11. In some aspects, an ASO of the disclosure hybridizes to a region within a STAT6 transcript (e.g., an intron, exon, or exon-intron junction), e.g., SEQ ID NO: 11, wherein the ASO has a design according to formula: 5′ A-B-C 3′ as described elsewhere herein.

[0449] In some aspects, the ASO targets a mRNA encoding a particular isoform of STAT6 protein (e.g., Isoform 1). In some aspects, the ASO targets all isoforms of STAT6 protein. In other aspects, the ASO targets two isoforms (e.g., Isoform 1 and Isoform 2, Isoform 1 and Isoform 3, or Isoform 2 and Isoform 3) of STAT6 protein.

[0450] In some aspects, the nucleotide sequence of the ASOs of the disclosure or the contiguous nucleotide sequence has at least about 80% sequence identity to a sequence selected from SEQ ID NOs: 601 to 703 (i.e., the sequences in FIG. 1B), such as at least about 80%, at least about 85%, at least about 90%, at least about 91%, at least about 92%, at least about 93%, at least about 94%, at least about 95%, at least about 96% sequence identity, at least about 97% sequence identity, at least about 98% sequence identity, at least about 99% sequence identity, such as about 100% sequence identity (homologous). In some aspects, the ASO has a design described elsewhere herein or a chemical structure shown elsewhere herein (e.g., FIG. 1B).

[0451] In some aspects the ASO (or contiguous nucleotide portion thereof) is selected from, or comprises, one of the sequences selected from the group consisting of SEQ ID NOs: 601 to 703 or a region of at least 10 contiguous nucleotides thereof, wherein the ASO (or contiguous nucleotide portion thereof) can optionally comprise one, two, three, or four mismatches when compared to the corresponding STAT6 transcript.

[0452] In some aspects, the ASO comprises the sequence as set forth in SEQ ID NO: 601 (e.g., ASO-STAT6-1053). In some aspects, the ASO comprises the sequence as set forth in SEQ ID NO: 602 (e.g., ASO-STAT6-1359). In some aspects, the ASO comprises the sequence as set forth in SEQ ID NO: 603 (e.g., ASO-STAT6-1890). In some aspects, the ASO comprises the sequence as set forth in SEQ ID NO: 604 (e.g., ASO-STAT6-1892). In some aspects, the ASO comprises the sequence as set forth in SEQ ID NO: 605 (e.g., ASO-STAT6-1915). In some aspects, the ASO comprises the sequence as set forth in SEQ ID NO: 606 (e.g., ASO-STAT6-1916). In some aspects, the ASO comprises the sequence as set forth in SEQ ID NO: 607 (e.g., ASO-STAT6-1917). In some aspects, the ASO comprises the sequence as set forth in SEQ ID NO: 608 (e.g., ASO-STAT6-1918). In some aspects, the ASO comprises the sequence as set forth in SEQ ID NO: 609 (e.g., ASO-STAT6-1919). In some aspects, the ASO comprises the sequence as set forth in SEQ ID NO: 610 (e.g., ASO-STAT6-1920). In some aspects, the ASO comprises the sequence as set forth in SEQ ID NO: 611 (e.g., ASO-STAT6-1937). In some aspects, the ASO comprises the sequence as set forth in SEQ ID NO: 612 (e.g., ASO-STAT6-1938). In some aspects, the ASO comprises the sequence as set forth in SEQ ID NO: 613 (e.g., ASO-STAT6-2061). In some aspects, the ASO comprises the sequence as set forth in SEQ ID NO: 614 (e.g., ASO-STAT6-2062). In some aspects, the ASO comprises the sequence as set forth in SEQ ID NO: 615 (e.g., ASO-STAT6-2063). In some aspects, the ASO comprises the sequence as set forth in SEQ ID NO: 616 (e.g., ASO-STAT6-2064). In some aspects, the ASO comprises the sequence as set forth in SEQ ID NO: 617 (e.g., ASO-STAT6-2066). In some aspects, the ASO comprises the sequence as set forth in SEQ ID NO: 618 (e.g., ASO-STAT6-2067). In some aspects, the ASO comprises the sequence as set forth in SEQ ID NO: 619 (e.g., ASO-STAT6-2068). In some aspects, the ASO comprises the sequence as set forth in SEQ ID NO: 620 (e.g., ASO-STAT6-2352). In some aspects, the ASO comprises the sequence as set forth in SEQ ID NO: 621 (e.g., ASO-STAT6-3073). In some aspects, the ASO comprises the sequence as set forth in SEQ ID NO: 622 (e.g., ASO-STAT6-1053). In some aspects, the ASO comprises the sequence as set forth in SEQ ID NO: 623 (e.g., ASO-STAT6-1054). In some aspects, the ASO comprises the sequence as set forth in SEQ ID NO: 624 (e.g., ASO-STAT6-1356). In some aspects, the ASO comprises the sequence as set forth in SEQ ID NO: 625 (e.g., ASO-STAT6-1847). In some aspects, the ASO comprises the sequence as set forth in SEQ ID NO: 626 (e.g., ASO-STAT6-1886). In some aspects, the ASO comprises the sequence as set forth in SEQ ID NO: 627 (e.g., ASO-STAT6-1887). In some aspects, the ASO comprises the sequence as set forth in SEQ ID NO: 628 (e.g., ASO-STAT6-1888). In some aspects, the ASO comprises the sequence as set forth in SEQ ID NO: 629 (e.g., ASO-STAT6-1889). In some aspects, the ASO comprises the sequence as set forth in SEQ ID NO: 630 (e.g., ASO-STAT6-1890). In some aspects, the ASO comprises the sequence as set forth in SEQ ID NO: 631 (e.g., ASO-STAT6-1893). In some aspects, the ASO comprises the sequence as set forth in SEQ ID NO: 632 (e.g., ASO-STAT6-1917). In some aspects, the ASO comprises the sequence as set forth in SEQ ID NO: 633 (e.g., ASO-STAT6-1919). In some aspects, the ASO comprises the sequence as set forth in SEQ ID NO: 634 (e.g., ASO-STAT6-2056). In some aspects, the ASO comprises the sequence as set forth in SEQ ID NO: 635 (e.g., ASO-STAT6-2060). In some aspects, the ASO comprises the sequence as set forth in SEQ ID NO: 636 (e.g., ASO-STAT6-2066). In some aspects, the ASO comprises the sequence as set forth in SEQ ID NO: 637 (e.g., ASO-STAT6-2070). In some aspects, the ASO comprises the sequence as set forth in SEQ ID NO: 638 (e.g., ASO-STAT6-2351). In some aspects, the ASO comprises the sequence as set forth in SEQ ID NO: 639 (e.g., ASO-STAT6-2352). In some aspects, the ASO comprises the sequence as set forth in SEQ ID NO: 640 (e.g., ASO-STAT6-2359). In some aspects, the ASO comprises the sequence as set forth in SEQ ID NO: 641 (e.g., ASO-STAT6-3633). In some aspects, the ASO comprises the sequence as set forth in SEQ ID NO: 642 (e.g., ASO-STAT6-673). In some aspects, the ASO comprises the sequence as set forth in SEQ ID NO: 643 (e.g., ASO-STAT6-1052). In some aspects, the ASO comprises the sequence as set forth in SEQ ID NO: 644 (e.g., ASO-STAT6-1356). In some aspects, the ASO comprises the sequence as set forth in SEQ ID NO: 645 (e.g., ASO-STAT6-1357). In some aspects, the ASO comprises the sequence as set forth in SEQ ID NO: 646 (e.g., ASO-STAT6-1359). In some aspects, the ASO comprises the sequence as set forth in SEQ ID NO: 647 (e.g., ASO-STAT6-1360). In some aspects, the ASO comprises the sequence as set forth in SEQ ID NO: 648 (e.g., ASO-STAT6-1839). In some aspects, the ASO comprises the sequence as set forth in SEQ ID NO: 649 (e.g., ASO-STAT6-1848). In some aspects, the ASO comprises the sequence as set forth in SEQ ID NO: 650 (e.g., ASO-STAT6-1849). In some aspects, the ASO comprises the sequence as set forth in SEQ ID NO: 651 (e.g., ASO-STAT6-1891). In some aspects, the ASO comprises the sequence as set forth in SEQ ID NO: 652 (e.g., ASO-STAT6-1915). In some aspects, the ASO comprises the sequence as set forth in SEQ ID NO: 653 (e.g., ASO-STAT6-1916). In some aspects, the ASO comprises the sequence as set forth in SEQ ID NO: 654 (e.g., ASO-STAT6-1917). In some aspects, the ASO comprises the sequence as set forth in SEQ ID NO: 655 (e.g., ASO-STAT6-1938). In some aspects, the ASO comprises the sequence as set forth in SEQ ID NO: 656 (e.g., ASO-STAT6-1939). In some aspects, the ASO comprises the sequence as set forth in SEQ ID NO: 657 (e.g., ASO-STAT6-2063). In some aspects, the ASO comprises the sequence as set forth in SEQ ID NO: 658 (e.g., ASO-STAT6-2064). In some aspects, the ASO comprises the sequence as set forth in SEQ ID NO: 659 (e.g., ASO-STAT6-2065). In some aspects, the ASO comprises the sequence as set forth in SEQ ID NO: 660 (e.g., ASO-STAT6-2066). In some aspects, the ASO comprises the sequence as set forth in SEQ ID NO: 661 (e.g., ASO-STAT6-2068). In some aspects, the ASO comprises the sequence as set forth in SEQ ID NO: 662 (e.g., ASO-STAT6-2187). In some aspects, the ASO comprises the sequence as set forth in SEQ ID NO: 663 (e.g., ASO-STAT6-2350). In some aspects, the ASO comprises the sequence as set forth in SEQ ID NO: 664 (e.g., ASO-STAT6-2351). In some aspects, the ASO comprises the sequence as set forth in SEQ ID NO: 665 (e.g., ASO-STAT6-2352). In some aspects, the ASO comprises the sequence as set forth in SEQ ID NO: 666 (e.g., ASO-STAT6-2357). In some aspects, the ASO comprises the sequence as set forth in SEQ ID NO: 667 (e.g., ASO-STAT6-513). In some aspects, the ASO comprises the sequence as set forth in SEQ ID NO: 668 (e.g., ASO-STAT6-671). In some aspects, the ASO comprises the sequence as set forth in SEQ ID NO: 669 (e.g., ASO-STAT6-1131). In some aspects, the ASO comprises the sequence as set forth in SEQ ID NO: 670 (e.g., ASO-STAT6-1354). In some aspects, the ASO comprises the sequence as set forth in SEQ ID NO: 671 (e.g., ASO-STAT6-1355). In some aspects, the ASO comprises the sequence as set forth in SEQ ID NO: 672 (e.g., ASO-STAT6-1356). In some aspects, the ASO comprises the sequence as set forth in SEQ ID NO: 673 (e.g., ASO-STAT6-1432). In some aspects, the ASO comprises the sequence as set forth in SEQ ID NO: 674 (e.g., ASO-STAT6-1555). In some aspects, the ASO comprises the sequence as set forth in SEQ ID NO: 675 (e.g., ASO-STAT6-1556). In some aspects, the ASO comprises the sequence as set forth in SEQ ID NO: 676 (e.g., ASO-STAT6-1557). In some aspects, the ASO comprises the sequence as set forth in SEQ ID NO: 677 (e.g., ASO-STAT6-1558). In some aspects, the ASO comprises the sequence as set forth in SEQ ID NO: 678 (e.g., ASO-STAT6-1826). In some aspects, the ASO comprises the sequence as set forth in SEQ ID NO: 679 (e.g., ASO-STAT6-1827). In some aspects, the ASO comprises the sequence as set forth in SEQ ID NO: 680 (e.g., ASO-STAT6-1833). In some aspects, the ASO comprises the sequence as set forth in SEQ ID NO: 681 (e.g., ASO-STAT6-1843). In some aspects, the ASO comprises the sequence as set forth in SEQ ID NO: 682 (e.g., ASO-STAT6-1846). In some aspects, the ASO comprises the sequence as set forth in SEQ ID NO: 683 (e.g., ASO-STAT6-1847). In some aspects, the ASO comprises the sequence as set forth in SEQ ID NO: 684 (e.g., ASO-STAT6-1883). In some aspects, the ASO comprises the sequence as set forth in SEQ ID NO: 685 (e.g., ASO-STAT6-1889). In some aspects, the ASO comprises the sequence as set forth in SEQ ID NO: 686 (e.g., ASO-STAT6-1890). In some aspects, the ASO comprises the sequence as set forth in SEQ ID NO: 687 (e.g., ASO-STAT6-1891). In some aspects, the ASO comprises the sequence as set forth in SEQ ID NO: 688 (e.g., ASO-STAT6-1916). In some aspects, the ASO comprises the sequence as set forth in SEQ ID NO: 689 (e.g., ASO-STAT6-1917). In some aspects, the ASO comprises the sequence as set forth in SEQ ID NO: 690 (e.g., ASO-STAT6-2056). In some aspects, the ASO comprises the sequence as set forth in SEQ ID NO: 691 (e.g., ASO-STAT6-2057). In some aspects, the ASO comprises the sequence as set forth in SEQ ID NO: 692 (e.g., ASO-STAT6-2060). In some aspects, the ASO comprises the sequence as set forth in SEQ ID NO: 693 (e.g., ASO-STAT6-2062). In some aspects, the ASO comprises the sequence as set forth in SEQ ID NO: 694 (e.g., ASO-STAT6-2063). In some aspects, the ASO comprises the sequence as set forth in SEQ ID NO: 695 (e.g., ASO-STAT6-2065). In some aspects, the ASO comprises the sequence as set forth in SEQ ID NO: 696 (e.g., ASO-STAT6-2068). In some aspects, the ASO comprises the sequence as set forth in SEQ ID NO: 697 (e.g., ASO-STAT6-2347). In some aspects, the ASO comprises the sequence as set forth in SEQ ID NO: 698 (e.g., ASO-STAT6-2348). In some aspects, the ASO comprises the sequence as set forth in SEQ ID NO: 699 (e.g., ASO-STAT6-2358). In some aspects, the ASO comprises the sequence as set forth in SEQ ID NO: 700 (e.g., ASO-STAT6-2782). In some aspects, the ASO comprises the sequence as set forth in SEQ ID NO: 701 (e.g., ASO-STAT6-3070). In some aspects, the ASO comprises the sequence as set forth in SEQ ID NO: 702 (e.g., ASO-STAT6-3071). In some aspects, the ASO comprises the sequence as set forth in SEQ ID NO: 703 (e.g., ASO-STAT6-3431).

[0453] In some aspects the ASO comprises or consists of a sequence at least about 60%, at least about 65%, at least about 70%, at least about 75%, at least about 80%, at least about 85%, at least about 90%, at least about 95%, at least about 96%, at least about 97%, at least about 98%, at least about 99%, or about 100% identical to a sequence set forth in SEQ ID NOs: 601 to 703. In some aspects the ASO (or contiguous nucleotide portion thereof) is selected from, or comprises, one of the sequences selected from the group consisting of SEQ ID NOs: 601 to 703 or a region of at least 8, 9, 10, 11, 12, 13, 14, 15, 16, 17, 18, 19, or 20 contiguous nucleotides thereof. In some aspects the ASO (or contiguous nucleotide portion thereof) is selected from, or comprises, one of the sequences selected from the group consisting of SEQ ID NOs: 601 to 703 or a region of at least 8, 9, 10, 11, 12, 13, 14, 15, 16, 17, 18, 19, or 20 contiguous nucleotides thereof, wherein the ASO (or contiguous nucleotide portion thereof) can optionally comprise one, two, three, or four mismatches when compared to the corresponding STAT6 transcript. In some aspects the ASO (or contiguous nucleotide portion thereof) is selected from, or comprises, one of the sequences selected from the group consisting of SEQ ID NOs: 601 to 703 except for 1, 2, 3, 4, 5, 6, 7, 8, 9 or 10 substitutions, wherein the substituted ASO can bind to the STAT6 transcript. In some aspects the ASO (or contiguous nucleotide portion thereof) is selected from, or comprises, one of the sequences selected from the group consisting of SEQ ID NOs: 601 to 703 or a region of at least 8, 9, 10, 11, 12, 13, 14, 15, 16, 17, 18, 19, or 20 contiguous nucleotides thereof, wherein the ASO (or contiguous nucleotide portion thereof) can optionally comprise one, two, three, or four additional 5′ and/or 3′ nucleotides complementary to the corresponding STAT6 transcript.

[0454] In some aspects, binding of an ASO targeting a STAT6 transcript disclosed herein to a mRNA transcript encoding STAT6 can reduce expression levels and/or activity levels of STAT6.

[0455] II.C.3. ASO Targeting CEBP/β

[0456] Unless indicated otherwise, the term “CEBP/β,” as used herein, can refer to CEBP/β from one or more species (e.g., humans, non-human primates, dogs, cats, guinea pigs, rabbits, rats, mice, horses, cattle, and bears).

[0457] CEBP/β (CEBP/β) is also known as CCAAT/enhancer-binding protein beta. Synonyms of CEBP/β/CEBP/β are known and include C/EBP beta; Liver activator protein; LAP; Liver-enriched inhibitory protein; LIP; Nuclear factor NF-IL6; transcription factor 5; TCF-5; CEBPB; CEBPb; CEBPβ; CEBP/B; and TCF5. The sequence for the human CEBP/β gene can be found under publicly available GenBank Accession Number NC_000020.11 (50190583 . . . 50192690). The human CEBP/β gene is found at chromosome location 20q13.13 at 50190583-50192690.

[0458] The sequence for the human CEBP/β pre-mRNA transcript (SEQ ID NO: 21) corresponds to the reverse complement of residues 50190583-50192690 of chromosome 20q13.13. The CEBP/β mRNA sequence (GenBank Accession No. NM_001285878.1) is provided in SEQ ID NO: 23, except that the nucleotide “t” in SEQ ID NO: 23 is shown as “u” in the mRNA. The sequence for human CEBP/β protein can be found under publicly available Accession Numbers: P17676, (canonical sequence, SEQ ID NO: 22), P17676-2 (SEQ ID NO: 24), and P17676-3 (SEQ ID NO: 25), each of which is incorporated by reference herein in its entirety.

[0459] Natural variants of the human CEBP/β gene product are known. For example, natural variants of human CEBP/β protein can contain one or more amino acid substitutions selected from: A241P, A253G, G195S, and any combination thereof. Additional variants of human CEBP/β protein resulting from alternative splicing are also known in the art. CEBP/β Isoform 2 (identifier: P17676-2 at UniProt) differs from the canonical sequence (SEQ ID NO: 23) as follows: deletion of residues 1-23 relative to SEQ ID NO: 23. The sequence of CEBP/β Isoform 3 (identifier: P17676-3) differs from the canonical sequence (SEQ ID NO: 23) as follows: deletion of residues 1-198 relative to SEQ ID NO: 23. Therefore, the ASOs of the present disclosure can be designed to reduce or inhibit expression of the natural variants of the protein.

[0460] An example of a target nucleic acid sequence of the ASOs is CEBP/β pre-mRNA. SEQ ID NO: 21 represents a human CEBP/β genomic sequence (i.e., reverse complement of nucleotides 50190583-50192690 of chromosome 20q13.13). SEQ ID NO: 21 is identical to a CEBP/β pre-mRNA sequence except that nucleotide “t” in SEQ ID NO: 21 is shown as “u” in pre-mRNA. In certain aspects, the “target nucleic acid” comprises an intron of a CEBP/β protein-encoding nucleic acids or naturally occurring variants thereof, and RNA nucleic acids derived therefrom, e.g., pre-mRNA. In other aspects, the target nucleic acid comprises an exon region of a CEBP/β protein-encoding nucleic acids or naturally occurring variants thereof, and RNA nucleic acids derived therefrom, e.g., pre-mRNA. In yet other aspects, the target nucleic acid comprises an exon-intron junction of a CEBP/β protein-encoding nucleic acids or naturally occurring variants thereof, and RNA nucleic acids derived therefrom, e.g., pre-mRNA. In some aspects, for example when used in research or diagnostics the “target nucleic acid” can be a cDNA or a synthetic oligonucleotide derived from the above DNA or RNA nucleic acid targets. The human CEBP/β protein sequence encoded by the CEBP/β pre-mRNA is shown as SEQ ID NO: 23. In other aspects, the target nucleic acid comprises an untranslated region of a CEBP/β protein-encoding nucleic acids or naturally occurring variants thereof, e.g., 5′ UTR, 3′ UTR, or both.

[0461] In some aspects, an ASO of the disclosure hybridizes to a region within the introns of a CEBP/β transcript, e.g., SEQ ID NO: 21. In certain aspects, an ASO of the disclosure hybridizes to a region within the exons of a CEBP/β transcript, e.g., SEQ ID NO: 21. In other aspects, an ASO of the disclosure hybridizes to a region within the exon-intron junction of a CEBP/β transcript, e.g., SEQ ID NO: 21. In some aspects, an ASO of the disclosure hybridizes to a region within a CEBP/β transcript (e.g., an intron, exon, or exon-intron junction), e.g., SEQ ID NO: 21, wherein the ASO has a design according to formula: 5′ A-B-C 3′ as described elsewhere herein.

[0462] In some aspects, the ASO targets a mRNA encoding a particular isoform of CEBP/β protein (e.g., Isoform 1). In some aspects, the ASO targets all isoforms of CEBP/β protein. In other aspects, the ASO targets two isoforms (e.g., Isoform 1 and Isoform 2, Isoform 1 and Isoform 3, or Isoform 2 and Isoform 3) of CEBP/β protein.

[0463] In some aspects, the nucleotide sequence of the ASOs of the disclosure or the contiguous nucleotide sequence has at least about 80% sequence identity to a sequence selected from SEQ ID NOs: 704-806 (i.e., the sequences in FIG. 1C), such as at least about 80%, at least about 85%, at least about 90%, at least about 91%, at least about 92%, at least about 93%, at least about 94%, at least about 95%, at least about 96% sequence identity, at least about 97% sequence identity, at least about 98% sequence identity, at least about 99% sequence identity, such as about 100% sequence identity (homologous). In some aspects, the ASO has a design described elsewhere herein or a chemical structure shown elsewhere herein (e.g., FIG. 1C).

[0464] In some aspects the ASO (or contiguous nucleotide portion thereof) is selected from, or comprises, one of the sequences selected from the group consisting of SEQ ID NOs: 704-806 or a region of at least 10 contiguous nucleotides thereof, wherein the ASO (or contiguous nucleotide portion thereof) can optionally comprise one, two, three, or four mismatches when compared to the corresponding CEBP/B transcript.

[0465] In some aspects, the ASO comprises the sequence as set forth in SEQ ID NO: 704 (e.g., ASO-CEBPb-540). In some aspects, the ASO comprises the sequence as set forth in SEQ ID NO: 705 (e.g., ASO-CEBPb-565). In some aspects, the ASO comprises the sequence as set forth in SEQ ID NO: 706 (e.g., ASO-CEBPb-569). In some aspects, the ASO comprises the sequence as set forth in SEQ ID NO: 707 (e.g., ASO-CEBPb-648). In some aspects, the ASO comprises the sequence as set forth in SEQ ID NO: 708 (e.g., ASO-CEBPb-816). In some aspects, the ASO comprises the sequence as set forth in SEQ ID NO: 709 (e.g., ASO-CEBPb-817). In some aspects, the ASO comprises the sequence as set forth in SEQ ID NO: 710 (e.g., ASO-CEBPb-818). In some aspects, the ASO comprises the sequence as set forth in SEQ ID NO: 711 (e.g., ASO-CEBPb-819). In some aspects, the ASO comprises the sequence as set forth in SEQ ID NO: 712 (e.g., ASO-CEBPb-820). In some aspects, the ASO comprises the sequence as set forth in SEQ ID NO: 713 (e.g., ASO-CEBPb-851). In some aspects, the ASO comprises the sequence as set forth in SEQ ID NO: 714 (e.g., ASO-CEBPb-853). In some aspects, the ASO comprises the sequence as set forth in SEQ ID NO: 715 (e.g., ASO-CEBPb-856). In some aspects, the ASO comprises the sequence as set forth in SEQ ID NO: 716 (e.g., ASO-CEBPb-858). In some aspects, the ASO comprises the sequence as set forth in SEQ ID NO: 717 (e.g., ASO-CEBPb-987). In some aspects, the ASO comprises the sequence as set forth in SEQ ID NO: 718 (e.g., ASO-CEBPb-1056). In some aspects, the ASO comprises the sequence as set forth in SEQ ID NO: 719 (e.g., ASO-CEBPb-1064). In some aspects, the ASO comprises the sequence as set forth in SEQ ID NO: 720 (e.g., ASO-CEBPb-1065). In some aspects, the ASO comprises the sequence as set forth in SEQ ID NO: 721 (e.g., ASO-CEBPb-1066). In some aspects, the ASO comprises the sequence as set forth in SEQ ID NO: 722 (e.g., ASO-CEBPb-1071). In some aspects, the ASO comprises the sequence as set forth in SEQ ID NO: 723 (e.g., ASO-CEBPb-1270). In some aspects, the ASO comprises the sequence as set forth in SEQ ID NO: 724 (e.g., ASO-CEBPb-1273). In some aspects, the ASO comprises the sequence as set forth in SEQ ID NO: 725 (e.g., ASO-CEBPb-1274). In some aspects, the ASO comprises the sequence as set forth in SEQ ID NO: 726 (e.g., ASO-CEBPb-1405). In some aspects, the ASO comprises the sequence as set forth in SEQ ID NO: 727 (e.g., ASO-CEBPb-1407). In some aspects, the ASO comprises the sequence as set forth in SEQ ID NO: 728 (e.g., ASO-CEBPb-539). In some aspects, the ASO comprises the sequence as set forth in SEQ ID NO: 729 (e.g., ASO-CEBPb-540). In some aspects, the ASO comprises the sequence as set forth in SEQ ID NO: 730 (e.g., ASO-CEBPb-563). In some aspects, the ASO comprises the sequence as set forth in SEQ ID NO: 731 (e.g., ASO-CEBPb-564). In some aspects, the ASO comprises the sequence as set forth in SEQ ID NO: 732 (e.g., ASO-CEBPb-565). In some aspects, the ASO comprises the sequence as set forth in SEQ ID NO: 733 (e.g., ASO-CEBPb-568). In some aspects, the ASO comprises the sequence as set forth in SEQ ID NO: 734 (e.g., ASO-CEBPb-644). In some aspects, the ASO comprises the sequence as set forth in SEQ ID NO: 735 (e.g., ASO-CEBPb-645). In some aspects, the ASO comprises the sequence as set forth in SEQ ID NO: 736 (e.g., ASO-CEBPb-648). In some aspects, the ASO comprises the sequence as set forth in SEQ ID NO: 737 (e.g., ASO-CEBPb-819). In some aspects, the ASO comprises the sequence as set forth in SEQ ID NO: 738 (e.g., ASO-CEBPb-855). In some aspects, the ASO comprises the sequence as set forth in SEQ ID NO: 739 (e.g., ASO-CEBPb-860). In some aspects, the ASO comprises the sequence as set forth in SEQ ID NO: 740 (e.g., ASO-CEBPb-986). In some aspects, the ASO comprises the sequence as set forth in SEQ ID NO: 741 (e.g., ASO-CEBPb-987). In some aspects, the ASO comprises the sequence as set forth in SEQ ID NO: 742 (e.g., ASO-CEBPb-996). In some aspects, the ASO comprises the sequence as set forth in SEQ ID NO: 743 (e.g., ASO-CEBPb-1049). In some aspects, the ASO comprises the sequence as set forth in SEQ ID NO: 744 (e.g., ASO-CEBPb-1050). In some aspects, the ASO comprises the sequence as set forth in SEQ ID NO: 745 (e.g., ASO-CEBPb-1064). In some aspects, the ASO comprises the sequence as set forth in SEQ ID NO: 746 (e.g., ASO-CEBPb-1065). In some aspects, the ASO comprises the sequence as set forth in SEQ ID NO: 747 (e.g., ASO-CEBPb-1066). In some aspects, the ASO comprises the sequence as set forth in SEQ ID NO: 748 (e.g., ASO-CEBPb-1083). In some aspects, the ASO comprises the sequence as set forth in SEQ ID NO: 749 (e.g., ASO-CEBPb-1088). In some aspects, the ASO comprises the sequence as set forth in SEQ ID NO: 750 (e.g., ASO-CEBPb-1253). In some aspects, the ASO comprises the sequence as set forth in SEQ ID NO: 751 (e.g., ASO-CEBPb-1269). In some aspects, the ASO comprises the sequence as set forth in SEQ ID NO: 752 (e.g., ASO-CEBPb-1272). In some aspects, the ASO comprises the sequence as set forth in SEQ ID NO: 753 (e.g., ASO-CEBPb-1274). In some aspects, the ASO comprises the sequence as set forth in SEQ ID NO: 754 (e.g., ASO-CEBPb-539). In some aspects, the ASO comprises the sequence as set forth in SEQ ID NO: 755 (e.g., ASO-CEBPb-564). In some aspects, the ASO comprises the sequence as set forth in SEQ ID NO: 756 (e.g., ASO-CEBPb-565). In some aspects, the ASO comprises the sequence as set forth in SEQ ID NO: 757 (e.g., ASO-CEBPb-567). In some aspects, the ASO comprises the sequence as set forth in SEQ ID NO: 758 (e.g., ASO-CEBPb-647). In some aspects, the ASO comprises the sequence as set forth in SEQ ID NO: 759 (e.g., ASO-CEBPb-648). In some aspects, the ASO comprises the sequence as set forth in SEQ ID NO: 760 (e.g., ASO-CEBPb-815). In some aspects, the ASO comprises the sequence as set forth in SEQ ID NO: 761 (e.g., ASO-CEBPb-818). In some aspects, the ASO comprises the sequence as set forth in SEQ ID NO: 762 (e.g., ASO-CEBPb-820). In some aspects, the ASO comprises the sequence as set forth in SEQ ID NO: 763 (e.g., ASO-CEBPb-854). In some aspects, the ASO comprises the sequence as set forth in SEQ ID NO: 764 (e.g., ASO-CEBPb-855). In some aspects, the ASO comprises the sequence as set forth in SEQ ID NO: 765 (e.g., ASO-CEBPb-859). In some aspects, the ASO comprises the sequence as set forth in SEQ ID NO: 766 (e.g., ASO-CEBPb-1050). In some aspects, the ASO comprises the sequence as set forth in SEQ ID NO: 767 (e.g., ASO-CEBPb-1053). In some aspects, the ASO comprises the sequence as set forth in SEQ ID NO: 768 (e.g., ASO-CEBPb-1062). In some aspects, the ASO comprises the sequence as set forth in SEQ ID NO: 769 (e.g., ASO-CEBPb-1063). In some aspects, the ASO comprises the sequence as set forth in SEQ ID NO: 770 (e.g., ASO-CEBPb-1064). In some aspects, the ASO comprises the sequence as set forth in SEQ ID NO: 771 (e.g., ASO-CEBPb-1065). In some aspects, the ASO comprises the sequence as set forth in SEQ ID NO: 772 (e.g., ASO-CEBPb-1265). In some aspects, the ASO comprises the sequence as set forth in SEQ ID NO: 773 (e.g., ASO-CEBPb-1270). In some aspects, the ASO comprises the sequence as set forth in SEQ ID NO: 774 (e.g., ASO-CEBPb-1271). In some aspects, the ASO comprises the sequence as set forth in SEQ ID NO: 775 (e.g., ASO-CEBPb-1272). In some aspects, the ASO comprises the sequence as set forth in SEQ ID NO: 776 (e.g., ASO-CEBPb-1274). In some aspects, the ASO comprises the sequence as set forth in SEQ ID NO: 777 (e.g., ASO-CEBPb-1277). In some aspects, the ASO comprises the sequence as set forth in SEQ ID NO: 778 (e.g., ASO-CEBPb-564). In some aspects, the ASO comprises the sequence as set forth in SEQ ID NO: 779 (e.g., ASO-CEBPb-565). In some aspects, the ASO comprises the sequence as set forth in SEQ ID NO: 780 (e.g., ASO-CEBPb-818). In some aspects, the ASO comprises the sequence as set forth in SEQ ID NO: 781 (e.g., ASO-CEBPb-1061). In some aspects, the ASO comprises the sequence as set forth in SEQ ID NO: 782 (e.g., ASO-CEBPb-1062). In some aspects, the ASO comprises the sequence as set forth in SEQ ID NO: 783 (e.g., ASO-CEBPb-1064). In some aspects, the ASO comprises the sequence as set forth in SEQ ID NO: 784 (e.g., ASO-CEBPb-1267). In some aspects, the ASO comprises the sequence as set forth in SEQ ID NO: 785 (e.g., ASO-CEBPb-1272). In some aspects, the ASO comprises the sequence as set forth in SEQ ID NO: 786 (e.g., ASO-CEBPb-645). In some aspects, the ASO comprises the sequence as set forth in SEQ ID NO: 787 (e.g., ASO-CEBPb-848). In some aspects, the ASO comprises the sequence as set forth in SEQ ID NO: 788 (e.g., ASO-CEBPb-849). In some aspects, the ASO comprises the sequence as set forth in SEQ ID NO: 789 (e.g., ASO-CEBPb-850). In some aspects, the ASO comprises the sequence as set forth in SEQ ID NO: 790 (e.g., ASO-CEBPb-1063). In some aspects, the ASO comprises the sequence as set forth in SEQ ID NO: 791 (e.g., ASO-CEBPb-1070). In some aspects, the ASO comprises the sequence as set forth in SEQ ID NO: 792 (e.g., ASO-CEBPb-1071). In some aspects, the ASO comprises the sequence as set forth in SEQ ID NO: 793 (e.g., ASO-CEBPb-1262). In some aspects, the ASO comprises the sequence as set forth in SEQ ID NO: 794 (e.g., ASO-CEBPb-1274). In some aspects, the ASO comprises the sequence as set forth in SEQ ID NO: 795 (e.g., ASO-CEBPb-1275). In some aspects, the ASO comprises the sequence as set forth in SEQ ID NO: 796 (e.g., ASO-CEBPb-644). In some aspects, the ASO comprises the sequence as set forth in SEQ ID NO: 797 (e.g., ASO-CEBPb-647). In some aspects, the ASO comprises the sequence as set forth in SEQ ID NO: 798 (e.g., ASO-CEBPb-851). In some aspects, the ASO comprises the sequence as set forth in SEQ ID NO: 799 (e.g., ASO-CEBPb-1266). In some aspects, the ASO comprises the sequence as set forth in SEQ ID NO: 800 (e.g., ASO-CEBPb-1268). In some aspects, the ASO comprises the sequence as set forth in SEQ ID NO: 801 (e.g., ASO-CEBPb-1270). In some aspects, the ASO comprises the sequence as set forth in SEQ ID NO: 802 (e.g., ASO-CEBPb-646). In some aspects, the ASO comprises the sequence as set forth in SEQ ID NO: 803 (e.g., ASO-CEBPb-1060). In some aspects, the ASO comprises the sequence as set forth in SEQ ID NO: 804 (e.g., ASO-CEBPb-1263). In some aspects, the ASO comprises the sequence as set forth in SEQ ID NO: 805 (e.g., ASO-CEBPb-1269). In some aspects, the ASO comprises the sequence as set forth in SEQ ID NO: 806 (e.g., ASO-CEBPb-1271).

[0466] In some aspects the ASO comprises or consists of a sequence at least about 60%, at least about 65%, at least about 70%, at least about 75%, at least about 80%, at least about 85%, at least about 90%, at least about 95%, at least about 96%, at least about 97%, at least about 98%, at least about 99%, or about 100% identical to a sequence set forth in SEQ ID NOs: 704 to 806. In some aspects the ASO (or contiguous nucleotide portion thereof) is selected from, or comprises, one of the sequences selected from the group consisting of SEQ ID NOs: 704 to 806 or a region of at least 8, 9, 10, 11, 12, 13, 14, 15, 16, 17, 18, 19, or 20 contiguous nucleotides thereof. In some aspects the ASO (or contiguous nucleotide portion thereof) is selected from, or comprises, one of the sequences selected from the group consisting of SEQ ID NOs: 704 to 806 or a region of at least 8, 9, 10, 11, 12, 13, 14, 15, 16, 17, 18, 19, or 20 contiguous nucleotides thereof, wherein the ASO (or contiguous nucleotide portion thereof) can optionally comprise one, two, three, or four mismatches when compared to the corresponding CEBPb transcript. In some aspects the ASO (or contiguous nucleotide portion thereof) is selected from, or comprises, one of the sequences selected from the group consisting of SEQ ID NOs: 704 to 806 except for 1, 2, 3, 4, 5, 6, 7, 8, 9 or 10 substitutions, wherein the substituted ASO can bind to the CEBPb transcript. In some aspects the ASO (or contiguous nucleotide portion thereof) is selected from, or comprises, one of the sequences selected from the group consisting of SEQ ID NOs: 704 to 806 or a region of at least 8, 9, 10, 11, 12, 13, 14, 15, 16, 17, 18, 19, or 20 contiguous nucleotides thereof, wherein the ASO (or contiguous nucleotide portion thereof) can optionally comprise one, two, three, or four additional 5′ and/or 3′ nucleotides complementary to the corresponding CEBPb transcript.

[0467] In some aspects, binding of an ASO targeting a CEBPb transcript disclosed herein to a mRNA transcript encoding CEBPb can reduce expression levels and/or activity levels of CEBPb.

[0468] II.C4. ASO Targeting STAT3

[0469] Signal Transducer and Activator of Transcription 3 (STAT3) is a signal transducer and activator of transcription that transmits signals from cell surface receptors to the nucleus. STAT3 is frequently hyperactivated in many human cancers. STAT3-encoding genomic DNA can be found at Chromosomal position 17q21.2 (i.e., nucleotides 5,001 to 80,171 of GenBank Accession No. NG_007370.1) High levels of activated STAT3 are often found to correlate with poor prognosis in human breast cancer patients in terms of metastatic progression (Ranger et al. 2009). Therefore, STAT3 represents a promising target for the prevention and treatment of both ER-positive and ER-negative breast cancer and also other cancers such as pancreatic, head/neck, prostate and lung cancers. However, current strategies of inhibiting STAT3 activity by means of blocking peptides, blockade of translocation, disrupting dimerization, or modulating phosphatase activity have not sufficiently inhibited STAT3 activity in cancer cells. Under normal conditions, STAT3 activation is transient and tightly regulated. Upon cellular stimulation by ligands such as growth factors or cytokines, STAT3 becomes phosphorylated on a critical tyrosine residue (Tyr705) and consequently induces STAT3 dimerization through two reciprocal phosphotyrosine (pTyr)-Src-homology 2 (SH2) interactions. The STAT3 dimers then translocate to the nucleus and bind to specific DNA-response elements in the promoters of target genes thereby activating transcription. The association of aberrant STAT3 activation with many types of human malignancies and solid tumors has made STAT3 an attractive molecular target for the development of novel cancer therapeutics.

[0470] STAT3 is often found to be constitutively activated in tumor cells and contribute to tumor progression through the modulation of target genes, such as antiapoptotic genes Bcl-xL, Bcl-2, Mcl-1 and survivin along with genes driving cell cycle progression, c-Myc and cyclin-D1. Aberrant activation of STAT3 is frequent in almost all blood malignancies and solid tumors, including lymphoma and leukemia, breast, prostate, lung head and neck, brain and colon cancer, which have made STAT3 an attractive target for the development of anticancer agents. The specificity of STAT activation is due to specific cytokines, i.e. each STAT is responsive to a small number of specific cytokines. Other non-cytokine signaling molecules, such as growth factors, have also been found to activate STATs. Binding of these factors to a cell surface receptor associated with protein tyrosine kinase also results in phosphorylation of STAT. STAT3 in particular has been found to be responsive to interleukin-6 (IL-6) as well as epidermal growth factor (EGF) (Darnell, Jr., J. E., et al., Science, 1994, 264, 1415-1421). Evidence exists suggesting that STAT3 may be regulated by the MAPK pathway. ERK2 induces serine phosphorylation and also associates with STAT3 (Jain, N., et al., Oncogene, 1998, 17, 3157-3167). STAT3 is expressed in most cell types and is also involved in the induction of expression of genes involved in response to tissue injury and inflammation. Aberrant expression of or constitutive expression of STAT3 is associated with a number of disease processes. STAT3 has been found to be constitutively active in myeloma tumor cells, both in culture and in bone marrow mononuclear cells from patients with multiple myeloma. These cells are resistant to Fas-mediated apoptosis and express high levels of Bcl-xL. The STAT3 SH2 domain is required for promoting dimerization. One of the limitations of targeting protein dimerization is the practicality of targeting the dimer interface, which is challenging owing to the planarity of the large surface area.

[0471] Signal transducer and activator of transcription 3 (STAT3) is known in the art by various names. Such names include: DNA-binding protein APRF, and acute-phase response factor. The mRNA encoding human STAT3 can be found at Genbank Accession Number NM_003150.3, and is represented by the sequence (SEQ ID NO: 43).

[0472] Natural variants of the human STAT3 gene product are known. For example, natural variants of human STAT3 protein can contain one or more amino acid substitutions selected from: R382L, R382Q, OR R382W, and any combinations thereof. Additional variants of human STAT3 protein resulting from alternative splicing are also known in the art, such as: R382W, F384L, F384S, T389I, N395Y, R423Q, N425Y, H437Y, Del-463, S611N, F621V, T622L, V637L, V637M, Del-644, Y657C, P330S, K392R, N646K, K658N, Del-701, or T716M. Therefore, the ASOs of the present disclosure can be designed to reduce or inhibit expression of the natural variants of the STAT3 protein.

[0473] SEQ ID NO: 41 is identical to a STAT3 pre-mRNA sequence except that nucleotide “t” in SEQ ID NO: 41 is shown as “u” in pre-mRNA. In certain aspects, the “target nucleic acid” comprises an intron of a STAT3 protein-encoding nucleic acids or naturally occurring variants thereof, and RNA nucleic acids derived therefrom, e.g., pre-mRNA. In other aspects, the target nucleic acid comprises an exon region of a STAT3 protein-encoding nucleic acids or naturally occurring variants thereof, and RNA nucleic acids derived therefrom, e.g., pre-mRNA. In yet other aspects, the target nucleic acid comprises an exon-intron junction of a STAT3 protein-encoding nucleic acids or naturally occurring variants thereof, and RNA nucleic acids derived therefrom, e.g., pre-mRNA. In some aspects, for example when used in research or diagnostics the “target nucleic acid” can be a cDNA or a synthetic oligonucleotide derived from the above DNA or RNA nucleic acid targets. The human STAT3 protein sequence encoded by the STAT3 pre-mRNA is shown as SEQ ID NO: 42. In other aspects, the target nucleic acid comprises an untranslated region of a STAT3 protein-encoding nucleic acids or naturally occurring variants thereof, e.g., 5′ UTR, 3′ UTR, or both.

[0474] In yet other aspects, the target nucleic acid comprises an exon-intron junction of a STAT3 protein-encoding nucleic acids or naturally occurring variants thereof, and RNA nucleic acids derived therefrom, e.g., pre-mRNA. In some aspects, for example when used in research or diagnostics the “target nucleic acid” can be a cDNA or a synthetic oligonucleotide derived from the above DNA or RNA nucleic acid targets. The human STAT3 protein sequence encoded by the STAT3 pre-mRNA is shown as SEQ ID NO: 43. In other aspects, the target nucleic acid comprises an untranslated region of a STAT3 protein-encoding nucleic acids or naturally occurring variants thereof, e.g., 5′ UTR, 3′ UTR, or both.

[0475] In some aspects, an ASO of the disclosure hybridizes to a region within the introns of a STAT3 transcript, e.g., SEQ ID NO: 41 or SEQ ID NO: 43. In certain aspects, an ASO of the disclosure hybridizes to a region within the exons of a STAT3 transcript, e.g., SEQ ID NO: 41 or SEQ ID NO: 43. In other aspects, an ASO of the disclosure hybridizes to a region within the exon-intron junction of a STAT3 transcript, e.g., SEQ ID NO: 41 or SEQ ID NO: 43. In some aspects, an ASO of the disclosure hybridizes to a region within a STAT3 transcript (e.g., an intron, exon, or exon-intron junction), e.g., SEQ ID NO: 41 or SEQ ID NO: 43, wherein the ASO has a design according to formula: 5′ A-B-C 3′ as described elsewhere herein.

[0476] In some aspects, the ASO targets a mRNA encoding a particular isoform of STAT3 protein (e.g., Isoform 1). In some aspects, the ASO targets all isoforms of STAT3 protein. In other aspects, the ASO targets two isoforms (e.g., Isoform 1 (UniProt ID: P40763-1) and Isoform 2 (UniProt ID: P40763-2), Isoform 2 and Isoform 3 (UniProt ID: P40763-3) of STAT3 protein.

[0477] In some aspects, an ASO of the disclosure hybridizes to a region within the introns of a STAT3 transcript, e.g., SEQ ID NO: 41 or SEQ ID NO: 43. In certain aspects, an ASO of the disclosure hybridizes to a region within the exons of a STAT3 transcript, e.g., SEQ ID NO: 41 or SEQ ID NO: 43. In other aspects, an ASO of the disclosure hybridizes to a region within the exon-intron junction of a STAT3 transcript, e.g., SEQ ID NO: 41 or SEQ ID NO: 43. In some aspects, an ASO of the disclosure hybridizes to a region within a STAT3 transcript (e.g., an intron, exon, or exon-intron junction), e.g., SEQ ID NO: 41 or SEQ ID NO: 43, wherein the ASO has a design according to formula: 5′ A-B-C 3′ as described elsewhere herein.

[0478] In some aspects, the ASO of the present disclosure hybridizes to multiple target regions within the STAT3 transcript (e.g., genomic sequence, SEQ ID NO: 41). In some aspects, the ASO hybridizes to two different target regions within the STAT3 transcript. In some aspects, the ASO hybridizes to three different target regions within the STAT3 transcript. The sequences of exemplary ASOs that hybridizes to multiple target regions, and the start/end sites of the different target regions are provided in FIG. 1D. In some aspects, the ASOs that hybridizes to multiple regions within the STAT3 transcript (e.g., genomic sequence, SEQ ID NO: 41) are more potent (e.g., having lower EC50) at reducing STAT3 expression compared to ASOs that hybridizes to a single region within the STAT3 transcript (e.g., genomic sequence, SEQ ID NO: 41).

[0479] The ASOs of the disclosure comprise a contiguous nucleotide sequence which corresponds to the complement of a region of STAT3 transcript, e.g., a nucleotide sequence corresponding to SEQ ID NO: 41.

[0480] In some aspects, the nucleotide sequence of the ASOs of the disclosure or the contiguous nucleotide sequence has at least about 80% sequence identity to a sequence selected from SEQ ID NOs: 889-988 (i.e., the sequences in FIG. 1D), such as at least about 80%, at least about 85%, at least about 90%, at least about 91%, at least about 92%, at least about 93%, at least about 94%, at least about 95%, at least about 96% sequence identity, at least about 97% sequence identity, at least about 98% sequence identity, at least about 99% sequence identity, such as about 100% sequence identity (homologous). In some aspects, the ASO has a design described elsewhere herein or a chemical structure shown elsewhere herein (e.g., FIG. 1D).

[0481] In some aspects the ASO (or contiguous nucleotide portion thereof) is selected from, or comprises, one of the sequences selected from the group consisting of SEQ ID NOs: 889-988 to STAT3 or a region of at least 10 contiguous nucleotides thereof, wherein the ASO (or contiguous nucleotide portion thereof) can optionally comprise one, two, three, or four mismatches when compared to the corresponding STAT3 transcript. Non-limiting exemplary ASOs targeting STAT3 gene are shown in FIG. 1D.

[0482] In some aspects, the ASO comprises the sequence as set forth in SEQ ID NO: 889 (e.g., ASO-STAT3-2559). In some aspects, the ASO comprises the sequence as set forth in SEQ ID NO: 890 (e.g., ASO-STAT3-2556). In some aspects, the ASO comprises the sequence as set forth in SEQ ID NO: 891 (e.g., ASO-STAT3-2557). In some aspects, the ASO comprises the sequence as set forth in SEQ ID NO: 892 (e.g., ASO-STAT3-1046). In some aspects, the ASO comprises the sequence as set forth in SEQ ID NO: 893 (e.g., ASO-STAT3-351). In some aspects, the ASO comprises the sequence as set forth in SEQ ID NO: 894 (e.g., ASO-STAT3-450). In some aspects, the ASO comprises the sequence as set forth in SEQ ID NO: 895 (e.g., ASO-STAT3-2558). In some aspects, the ASO comprises the sequence as set forth in SEQ ID NO: 896 (e.g., ASO-STAT3-2558). In some aspects, the ASO comprises the sequence as set forth in SEQ ID NO: 897 (e.g., ASO-STAT3-865). In some aspects, the ASO comprises the sequence as set forth in SEQ ID NO: 898 (e.g., ASO-STAT3-894). In some aspects, the ASO comprises the sequence as set forth in SEQ ID NO: 899 (e.g., ASO-STAT3-1778). In some aspects, the ASO comprises the sequence as set forth in SEQ ID NO: 900 (e.g., ASO-STAT3-2558). In some aspects, the ASO comprises the sequence as set forth in SEQ ID NO: 901 (e.g., ASO-STAT3-1482). In some aspects, the ASO comprises the sequence as set forth in SEQ ID NO: 902 (e.g., ASO-STAT3-892). In some aspects, the ASO comprises the sequence as set forth in SEQ ID NO: 903 (e.g., ASO-STAT3-2262). In some aspects, the ASO comprises the sequence as set forth in SEQ ID NO: 904 (e.g., ASO-STAT3-2267). In some aspects, the ASO comprises the sequence as set forth in SEQ ID NO: 905 (e.g., ASO-STAT3-411). In some aspects, the ASO comprises the sequence as set forth in SEQ ID NO: 906 (e.g., ASO-STAT3-2267). In some aspects, the ASO comprises the sequence as set forth in SEQ ID NO: 907 (e.g., ASO-STAT3-896). In some aspects, the ASO comprises the sequence as set forth in SEQ ID NO: 908 (e.g., ASO-STAT3-2555). In some aspects, the ASO comprises the sequence as set forth in SEQ ID NO: 909 (e.g., ASO-STAT3-525). In some aspects, the ASO comprises the sequence as set forth in SEQ ID NO: 910 (e.g., ASO-STAT3-1766). In some aspects, the ASO comprises the sequence as set forth in SEQ ID NO: 911 (e.g., ASO-STAT3-1114). In some aspects, the ASO comprises the sequence as set forth in SEQ ID NO: 912 (e.g., ASO-STAT3-2557). In some aspects, the ASO comprises the sequence as set forth in SEQ ID NO: 913 (e.g., ASO-STAT3-995). In some aspects, the ASO comprises the sequence as set forth in SEQ ID NO: 914 (e.g., ASO-STAT3-2263). In some aspects, the ASO comprises the sequence as set forth in SEQ ID NO: 915 (e.g., ASO-STAT3-511). In some aspects, the ASO comprises the sequence as set forth in SEQ ID NO: 916 (e.g., ASO-STAT3-511). In some aspects, the ASO comprises the sequence as set forth in SEQ ID NO: 917 (e.g., ASO-STAT3-1043). In some aspects, the ASO comprises the sequence as set forth in SEQ ID NO: 918 (e.g., ASO-STAT3-1780). In some aspects, the ASO comprises the sequence as set forth in SEQ ID NO: 919 (e.g., ASO-STAT3-458). In some aspects, the ASO comprises the sequence as set forth in SEQ ID NO: 920 (e.g., ASO-STAT3-894). In some aspects, the ASO comprises the sequence as set forth in SEQ ID NO: 921 (e.g., ASO-STAT3-1779). In some aspects, the ASO comprises the sequence as set forth in SEQ ID NO: 922 (e.g., ASO-STAT3-2274). In some aspects, the ASO comprises the sequence as set forth in SEQ ID NO: 923 (e.g., ASO-STAT3-1039). In some aspects, the ASO comprises the sequence as set forth in SEQ ID NO: 924 (e.g., ASO-STAT3-1238). In some aspects, the ASO comprises the sequence as set forth in SEQ ID NO: 925 (e.g., ASO-STAT3-1239). In some aspects, the ASO comprises the sequence as set forth in SEQ ID NO: 926 (e.g., ASO-STAT3-516). In some aspects, the ASO comprises the sequence as set forth in SEQ ID NO: 927 (e.g., ASO-STAT3-1238). In some aspects, the ASO comprises the sequence as set forth in SEQ ID NO: 928 (e.g., ASO-STAT3-1034). In some aspects, the ASO comprises the sequence as set forth in SEQ ID NO: 929 (e.g., ASO-STAT3-1239). In some aspects, the ASO comprises the sequence as set forth in SEQ ID NO: 930 (e.g., ASO-STAT3-1113). In some aspects, the ASO comprises the sequence as set forth in SEQ ID NO: 931 (e.g., ASO-STAT3-1484). In some aspects, the ASO comprises the sequence as set forth in SEQ ID NO: 932 (e.g., ASO-STAT3-2556). In some aspects, the ASO comprises the sequence as set forth in SEQ ID NO: 933 (e.g., ASO-STAT3-461). In some aspects, the ASO comprises the sequence as set forth in SEQ ID NO: 934 (e.g., ASO-STAT3-2273). In some aspects, the ASO comprises the sequence as set forth in SEQ ID NO: 935 (e.g., ASO-STAT3-1783). In some aspects, the ASO comprises the sequence as set forth in SEQ ID NO: 936 (e.g., ASO-STAT3-891). In some aspects, the ASO comprises the sequence as set forth in SEQ ID NO: 937 (e.g., ASO-STAT3-510). In some aspects, the ASO comprises the sequence as set forth in SEQ ID NO: 938 (e.g., ASO-STAT3-2115). In some aspects, the ASO comprises the sequence as set forth in SEQ ID NO: 939 (e.g., ASO-STAT3-1482). In some aspects, the ASO comprises the sequence as set forth in SEQ ID NO: 940 (e.g., ASO-STAT3-986). In some aspects, the ASO comprises the sequence as set forth in SEQ ID NO: 941 (e.g., ASO-STAT3-893). In some aspects, the ASO comprises the sequence as set forth in SEQ ID NO: 942 (e.g., ASO-STAT3-1237). In some aspects, the ASO comprises the sequence as set forth in SEQ ID NO: 943 (e.g., ASO-STAT3-1111). In some aspects, the ASO comprises the sequence as set forth in SEQ ID NO: 944 (e.g., ASO-STAT3-1236). In some aspects, the ASO comprises the sequence as set forth in SEQ ID NO: 945 (e.g., ASO-STAT3-2557). In some aspects, the ASO comprises the sequence as set forth in SEQ ID NO: 946 (e.g., ASO-STAT3-2264). In some aspects, the ASO comprises the sequence as set forth in SEQ ID NO: 947 (e.g., ASO-STAT3-1234). In some aspects, the ASO comprises the sequence as set forth in SEQ ID NO: 948 (e.g., ASO-STAT3-1241). In some aspects, the ASO comprises the sequence as set forth in SEQ ID NO: 949 (e.g., ASO-STAT3-524). In some aspects, the ASO comprises the sequence as set forth in SEQ ID NO: 950 (e.g., ASO-STAT3-890). In some aspects, the ASO comprises the sequence as set forth in SEQ ID NO: 951 (e.g., ASO-STAT3-1114). In some aspects, the ASO comprises the sequence as set forth in SEQ ID NO: 952 (e.g., ASO-STAT3-1108). In some aspects, the ASO comprises the sequence as set forth in SEQ ID NO: 953 (e.g., ASO-STAT3-409). In some aspects, the ASO comprises the sequence as set forth in SEQ ID NO: 954 (e.g., ASO-STAT3-1356). In some aspects, the ASO comprises the sequence as set forth in SEQ ID NO: 955 (e.g., ASO-STAT3-1231). In some aspects, the ASO comprises the sequence as set forth in SEQ ID NO: 956 (e.g., ASO-STAT3-2267). In some aspects, the ASO comprises the sequence as set forth in SEQ ID NO: 957 (e.g., ASO-STAT3-1238). In some aspects, the ASO comprises the sequence as set forth in SEQ ID NO: 958 (e.g., ASO-STAT3-1237). In some aspects, the ASO comprises the sequence as set forth in SEQ ID NO: 959 (e.g., ASO-STAT3-522). In some aspects, the ASO comprises the sequence as set forth in SEQ ID NO: 960 (e.g., ASO-STAT3-2266). In some aspects, the ASO comprises the sequence as set forth in SEQ ID NO: 961 (e.g., ASO-STAT3-1998). In some aspects, the ASO comprises the sequence as set forth in SEQ ID NO: 962 (e.g., ASO-STAT3-881). In some aspects, the ASO comprises the sequence as set forth in SEQ ID NO: 963 (e.g., ASO-STAT3-513). In some aspects, the ASO comprises the sequence as set forth in SEQ ID NO: 964 (e.g., ASO-STAT3-1107). In some aspects, the ASO comprises the sequence as set forth in SEQ ID NO: 965 (e.g., ASO-STAT3-1235). In some aspects, the ASO comprises the sequence as set forth in SEQ ID NO: 966 (e.g., ASO-STAT3-882). In some aspects, the ASO comprises the sequence as set forth in SEQ ID NO: 967 (e.g., ASO-STAT3-1112). In some aspects, the ASO comprises the sequence as set forth in SEQ ID NO: 968 (e.g., ASO-STAT3-521). In some aspects, the ASO comprises the sequence as set forth in SEQ ID NO: 969 (e.g., ASO-STAT3-1110). In some aspects, the ASO comprises the sequence as set forth in SEQ ID NO: 970 (e.g., ASO-STAT3-1475). In some aspects, the ASO comprises the sequence as set forth in SEQ ID NO: 971 (e.g., ASO-STAT3-894). In some aspects, the ASO comprises the sequence as set forth in SEQ ID NO: 972 (e.g., ASO-STAT3-519). In some aspects, the ASO comprises the sequence as set forth in SEQ ID NO: 973 (e.g., ASO-STAT3-2553). In some aspects, the ASO comprises the sequence as set forth in SEQ ID NO: 974 (e.g., ASO-STAT3-2552). In some aspects, the ASO comprises the sequence as set forth in SEQ ID NO: 975 (e.g., ASO-STAT3-883). In some aspects, the ASO comprises the sequence as set forth in SEQ ID NO: 976 (e.g., ASO-STAT3-842). In some aspects, the ASO comprises the sequence as set forth in SEQ ID NO: 977 (e.g., ASO-STAT3-851). In some aspects, the ASO comprises the sequence as set forth in SEQ ID NO: 978 (e.g., ASO-STAT3-2265). In some aspects, the ASO comprises the sequence as set forth in SEQ ID NO: 979 (e.g., ASO-STAT3-520). In some aspects, the ASO comprises the sequence as set forth in SEQ ID NO: 980 (e.g., ASO-STAT3-985). In some aspects, the ASO comprises the sequence as set forth in SEQ ID NO: 981 (e.g., ASO-STAT3-524). In some aspects, the ASO comprises the sequence as set forth in SEQ ID NO: 982 (e.g., ASO-STAT3-1106). In some aspects, the ASO comprises the sequence as set forth in SEQ ID NO: 983 (e.g., ASO-STAT3-517). In some aspects, the ASO comprises the sequence as set forth in SEQ ID NO: 984 (e.g., ASO-STAT3-1721). In some aspects, the ASO comprises the sequence as set forth in SEQ ID NO: 985 (e.g., ASO-STAT3-1113). In some aspects, the ASO comprises the sequence as set forth in SEQ ID NO: 986 (e.g., ASO-STAT3-992). In some aspects, the ASO comprises the sequence as set forth in SEQ ID NO: 987 (e.g., ASO-STAT3-993). In some aspects, the ASO comprises the sequence as set forth in SEQ ID NO: 988 (e.g., ASO-STAT3-1104).

[0483] In some aspects the ASO comprises or consists of a sequence at least about 60%, at least about 65%, at least about 70%, at least about 75%, at least about 80%, at least about 85%, at least about 90%, at least about 95%, at least about 96%, at least about 97%, at least about 98%, at least about 99%, or about 100% identical to a sequence set forth in SEQ ID NOs: 889 to 988. In some aspects the ASO (or contiguous nucleotide portion thereof) is selected from, or comprises, one of the sequences selected from the group consisting of SEQ ID NOs: 889 to 988 or a region of at least 8, 9, 10, 11, 12, 13, 14, 15, 16, 17, 18, 19, or 20 contiguous nucleotides thereof. In some aspects the ASO (or contiguous nucleotide portion thereof) is selected from, or comprises, one of the sequences selected from the group consisting of SEQ ID NOs: 889 to 988 or a region of at least 8, 9, 10, 11, 12, 13, 14, 15, 16, 17, 18, 19, or 20 contiguous nucleotides thereof, wherein the ASO (or contiguous nucleotide portion thereof) can optionally comprise one, two, three, or four mismatches when compared to the corresponding STAT3 transcript. In some aspects the ASO (or contiguous nucleotide portion thereof) is selected from, or comprises, one of the sequences selected from the group consisting of SEQ ID NOs: 889 to 988 except for 1, 2, 3, 4, 5, 6, 7, 8, 9 or 10 substitutions, wherein the substituted ASO can bind to the CEBPb transcript. In some aspects the ASO (or contiguous nucleotide portion thereof) is selected from, or comprises, one of the sequences selected from the group consisting of SEQ ID NOs: 889 to 988 or a region of at least 8, 9, 10, 11, 12, 13, 14, 15, 16, 17, 18, 19, or 20 contiguous nucleotides thereof, wherein the ASO (or contiguous nucleotide portion thereof) can optionally comprise one, two, three, or four additional 5′ and/or 3′ nucleotides complementary to the corresponding STAT3 transcript.

[0484] In some aspects, binding of an ASO targeting a STAT3 transcript disclosed herein to a mRNA transcript encoding STAT3 can reduce expression levels and/or activity levels of STAT3.

[0485] II.C.5. ASO Targeting NRAS

[0486] NRas is an oncogene encoding a membrane protein that shuttles between the Golgi apparatus and the plasma membrane. NRas-encoding genomic DNA can be found at Chromosomal position 1p13.2 (i.e., nucleotides 5001 to 17438 of GenBank Accession No. NG_007572). Specifically, a combination of time-lapse microscopy and photobleaching techniques have revealed that in the absence of palmitoylation, GFP-tagged N-Ras undergoes rapid exchange between the cytosol and ER/Golgi membranes, and that wild-type GFP-N-Ras is recycled to the Golgi complex by a nonvesicular mechanism. N-ras mutations have been described in melanoma, thyroid carcinoma, teratocarcinoma, fibrosarcoma, neuroblastoma, rhabdomyosarcoma, Burkitt lymphoma, acute promyelocytic leukemia, T cell leukemia, and chronic myelogenous leukemia. Oncogenic N-Ras can induce acute myeloid leukemia (AML)- or chronic myelomonocytic leukemia (CMML)-like disease in mice.

[0487] Neuroblastoma RAS viral oncogene (NRas) is known in the art by various names. Such names include: GTPase NRas, N-ras protein part 4, neuroblastoma RAS viral (v-ras) oncogene homolog neuroblastoma RAS viral oncogene homolog, transforming protein N-Ras, and v-ras neuroblastoma RAS viral oncogene homolog.

[0488] The NRAS gene provides instructions for making a protein called N-Ras that is involved primarily in regulating cell division. The mRNA sequence encoding human NRAS can be found at NCBI Reference sequence NM_002524.5 and is represented by the coding sequence (SEQ ID NO: 53).

[0489] Natural variants of the human NRas gene product are known. For example, natural variants of human NRas protein can contain one or more amino acid substitutions selected from: G12D, G13D, T50I, G60E, and any combinations thereof. Additional variants of human NRas protein resulting from alternative splicing are also known in the art, such as: G13R, Q61K, Q61R, and P34L. Therefore, the ASOs of the present disclosure can be designed to reduce or inhibit expression of the natural variants of the STAT3 protein.

[0490] SEQ ID NO: 51 is identical to a NRas pre-mRNA sequence except that nucleotide “t” in SEQ ID NO: 51 is shown as “u” in pre-mRNA. In certain aspects, the “target nucleic acid” comprises an intron of a NRas protein-encoding nucleic acids or naturally occurring variants thereof, and RNA nucleic acids derived therefrom, e.g., pre-mRNA. In other aspects, the target nucleic acid comprises an exon region of a NRas protein-encoding nucleic acids or naturally occurring variants thereof, and RNA nucleic acids derived therefrom, e.g., pre-mRNA. In yet other aspects, the target nucleic acid comprises an exon-intron junction of a NRas protein-encoding nucleic acids or naturally occurring variants thereof, and RNA nucleic acids derived therefrom, e.g., pre-mRNA. In some aspects, for example when used in research or diagnostics the “target nucleic acid” can be a cDNA or a synthetic oligonucleotide derived from the above DNA or RNA nucleic acid targets. The human NRas protein sequence encoded by the NRas pre-mRNA is shown as SEQ ID NO: 52. In other aspects, the target nucleic acid comprises an untranslated region of a NRas protein-encoding nucleic acids or naturally occurring variants thereof, e.g., 5′ UTR, 3′ UTR, or both.

[0491] In certain aspects, the ASOs of the disclosure also are capable of down-regulating (e.g., reducing or removing) expression of the NRas mRNA or protein. In this regard, the ASO of the disclosure can affect indirect inhibition of NRas protein through the reduction in NRas mRNA levels, typically in a mammalian cell, such as a human cell, such as a tumor cell. In particular, the present disclosure is directed to ASOs that target one or more regions of the NRas pre-mRNA (e.g., intron regions, exon regions, and/or exon-intron junction regions). Unless indicated otherwise, the term “NRas,” as used herein, can refer to NRas from one or more species (e.g., humans, non-human primates, dogs, cats, guinea pigs, rabbits, rats, mice, horses, cattle, and bears).

[0492] In some aspects, an ASO of the disclosure hybridizes to a region within the introns of a NRAS transcript, e.g., SEQ ID NO: 51 or SEQ ID NO: 53. In certain aspects, an ASO of the disclosure hybridizes to a region within the exons of a NRAS transcript, e.g., SEQ ID NO: 51 or SEQ ID NO: 53. In other aspects, an ASO of the disclosure hybridizes to a region within the exon-intron junction of a NRAS transcript, e.g., SEQ ID NO: 51 or SEQ ID NO: 53. In some aspects, an ASO of the disclosure hybridizes to a region within a NRAS transcript (e.g., an intron, exon, or exon-intron junction), e.g., SEQ ID NO: 51 or SEQ ID NO: 53, wherein the ASO has a design according to formula: 5′ A-B-C 3′ as described elsewhere herein.

[0493] In some aspects, the ASO of the present disclosure hybridizes to multiple target regions within the NRas transcript (e.g., genomic sequence, SEQ ID NO: 51). In some aspects, the ASO hybridizes to two different target regions within the NRas transcript. In some aspects, the ASO hybridizes to three different target regions within the NRas transcript. The sequences of exemplary ASOs that hybridizes to multiple target regions, and the start/end sites of the different target regions are provided in FIG. 1E. In some aspects, the ASOs that hybridizes to multiple regions within the NRas transcript (e.g., genomic sequence, SEQ ID NO: 51) are more potent (e.g., having lower EC50) at reducing NRas expression compared to ASOs that hybridizes to a single region within the NRas transcript (e.g., genomic sequence, SEQ ID NO: 51).

[0494] In some aspects, the ASO targets a mRNA encoding a particular isoform of NRAS protein (e.g., Isoform 1, NCBI ID: NP_001229821.1). In some aspects, the ASO targets all isoforms of NRas protein. In other aspects, the ASO targets two isoforms (e.g., Isoform 1 and Isoform 2 (NCBI ID:NP_009089.4), Isoform 2 and Isoform 3 (NCBI ID: NP_001123995), and Isoform 3 and Isoform 4 (NCBI ID: NP_001229820.1)) of NRas protein.

[0495] The ASOs of the disclosure comprise a contiguous nucleotide sequence which corresponds to the complement of a region of NRas transcript, e.g., a nucleotide sequence corresponding to SEQ ID NO: 51.

[0496] In some aspects, the nucleotide sequence of the ASOs of the disclosure or the contiguous nucleotide sequence has at least about 80% sequence identity to a sequence selected from SEQ ID NOs: 989-1088 (i.e., the sequences in FIG. 1E), such as at least about 80%, at least about 85%, at least about 90%, at least about 91%, at least about 92%, at least about 93%, at least about 94%, at least about 95%, at least about 96% sequence identity, at least about 97% sequence identity, at least about 98% sequence identity, at least about 99% sequence identity, such as about 100% sequence identity (homologous). In some aspects, the ASO has a design described elsewhere herein or a chemical structure shown elsewhere herein (e.g., FIG. 1E).

[0497] In some aspects the ASO (or contiguous nucleotide portion thereof) is selected from, or comprises, one of the sequences selected from the group consisting of SEQ ID NOs: 989-1088 to NRas or a region of at least 10 contiguous nucleotides thereof, wherein the ASO (or contiguous nucleotide portion thereof) can optionally comprise one, two, three, or four mismatches when compared to the corresponding NRas transcript. Non limiting exemplary ASOs targeting NRAS gene can be found at FIG. 1E.

[0498] In some aspects, the ASO comprises the sequence as set forth in SEQ ID NO: 989 (e.g., ASO-NRas-180). In some aspects, the ASO comprises the sequence as set forth in SEQ ID NO: 990 (e.g., ASO-NRas-181). In some aspects, the ASO comprises the sequence as set forth in SEQ ID NO: 991 (e.g., ASO-NRas-434). In some aspects, the ASO comprises the sequence as set forth in SEQ ID NO: 992 (e.g., ASO-NRas-617). In some aspects, the ASO comprises the sequence as set forth in SEQ ID NO: 993 (e.g., ASO-NRas-618). In some aspects, the ASO comprises the sequence as set forth in SEQ ID NO: 994 (e.g., ASO-NRas-619). In some aspects, the ASO comprises the sequence as set forth in SEQ ID NO: 995 (e.g., ASO-NRas-620). In some aspects, the ASO comprises the sequence as set forth in SEQ ID NO: 996 (e.g., ASO-NRas-3002). In some aspects, the ASO comprises the sequence as set forth in SEQ ID NO: 997 (e.g., ASO-NRas-617). In some aspects, the ASO comprises the sequence as set forth in SEQ ID NO: 998 (e.g., ASO-NRas-618). In some aspects, the ASO comprises the sequence as set forth in SEQ ID NO: 999 (e.g., ASO-NRas-619). In some aspects, the ASO comprises the sequence as set forth in SEQ ID NO: 1000 (e.g., ASO-NRas-615). In some aspects, the ASO comprises the sequence as set forth in SEQ ID NO: 1001 (e.g., ASO-NRas-616). In some aspects, the ASO comprises the sequence as set forth in SEQ ID NO: 1002 (e.g., ASO-NRas-617). In some aspects, the ASO comprises the sequence as set forth in SEQ ID NO: 1003 (e.g., ASO-NRas-618). In some aspects, the ASO comprises the sequence as set forth in SEQ ID NO: 1004 (e.g., ASO-NRas-619). In some aspects, the ASO comprises the sequence as set forth in SEQ ID NO: 1005 (e.g., ASO-NRas-620). In some aspects, the ASO comprises the sequence as set forth in SEQ ID NO: 1006 (e.g., ASO-NRas-134). In some aspects, the ASO comprises the sequence as set forth in SEQ ID NO: 1007 (e.g., ASO-NRas-176). In some aspects, the ASO comprises the sequence as set forth in SEQ ID NO: 1008 (e.g., ASO-NRas-179). In some aspects, the ASO comprises the sequence as set forth in SEQ ID NO: 1009 (e.g., ASO-NRas-180). In some aspects, the ASO comprises the sequence as set forth in SEQ ID NO: 1010 (e.g., ASO-NRas-181). In some aspects, the ASO comprises the sequence as set forth in SEQ ID NO: 1011 (e.g., ASO-NRas-183). In some aspects, the ASO comprises the sequence as set forth in SEQ ID NO: 1012 (e.g., ASO-NRas-325). In some aspects, the ASO comprises the sequence as set forth in SEQ ID NO: 1013 (e.g., ASO-NRas-337). In some aspects, the ASO comprises the sequence as set forth in SEQ ID NO: 1014 (e.g., ASO-NRas-338). In some aspects, the ASO comprises the sequence as set forth in SEQ ID NO: 1015 (e.g., ASO-NRas-341). In some aspects, the ASO comprises the sequence as set forth in SEQ ID NO: 1016 (e.g., ASO-NRas-378). In some aspects, the ASO comprises the sequence as set forth in SEQ ID NO: 1017 (e.g., ASO-NRas-379). In some aspects, the ASO comprises the sequence as set forth in SEQ ID NO: 1018 (e.g., ASO-NRas-388). In some aspects, the ASO comprises the sequence as set forth in SEQ ID NO: 1019 (e.g., ASO-NRas-389). In some aspects, the ASO comprises the sequence as set forth in SEQ ID NO: 1020 (e.g., ASO-NRas-399). In some aspects, the ASO comprises the sequence as set forth in SEQ ID NO: 1021 (e.g., ASO-NRas-400). In some aspects, the ASO comprises the sequence as set forth in SEQ ID NO: 1022 (e.g., ASO-NRas-401). In some aspects, the ASO comprises the sequence as set forth in SEQ ID NO: 1023 (e.g., ASO-NRas-402). In some aspects, the ASO comprises the sequence as set forth in SEQ ID NO: 1024 (e.g., ASO-NRas-408). In some aspects, the ASO comprises the sequence as set forth in SEQ ID NO: 1025 (e.g., ASO-NRas-421). In some aspects, the ASO comprises the sequence as set forth in SEQ ID NO: 1026 (e.g., ASO-NRas-422). In some aspects, the ASO comprises the sequence as set forth in SEQ ID NO: 1027 (e.g., ASO-NRas-429). In some aspects, the ASO comprises the sequence as set forth in SEQ ID NO: 1028 (e.g., ASO-NRas-490). In some aspects, the ASO comprises the sequence as set forth in SEQ ID NO: 1029 (e.g., ASO-NRas-513). In some aspects, the ASO comprises the sequence as set forth in SEQ ID NO: 1030 (e.g., ASO-NRas-514). In some aspects, the ASO comprises the sequence as set forth in SEQ ID NO: 1031 (e.g., ASO-NRas-520). In some aspects, the ASO comprises the sequence as set forth in SEQ ID NO: 1032 (e.g., ASO-NRas-521). In some aspects, the ASO comprises the sequence as set forth in SEQ ID NO: 1033 (e.g., ASO-NRas-522). In some aspects, the ASO comprises the sequence as set forth in SEQ ID NO: 1034 (e.g., ASO-NRas-524). In some aspects, the ASO comprises the sequence as set forth in SEQ ID NO: 1035 (e.g., ASO-NRas-532). In some aspects, the ASO comprises the sequence as set forth in SEQ ID NO: 1036 (e.g., ASO-NRas-534). In some aspects, the ASO comprises the sequence as set forth in SEQ ID NO: 1037 (e.g., ASO-NRas-535). In some aspects, the ASO comprises the sequence as set forth in SEQ ID NO: 1038 (e.g., ASO-NRas-536). In some aspects, the ASO comprises the sequence as set forth in SEQ ID NO: 1039 (e.g., ASO-NRas-537). In some aspects, the ASO comprises the sequence as set forth in SEQ ID NO: 1040 (e.g., ASO-NRas-539). In some aspects, the ASO comprises the sequence as set forth in SEQ ID NO: 1041 (e.g., ASO-NRas-604). In some aspects, the ASO comprises the sequence as set forth in SEQ ID NO: 1042 (e.g., ASO-NRas-611). In some aspects, the ASO comprises the sequence as set forth in SEQ ID NO: 1043 (e.g., ASO-NRas-612). In some aspects, the ASO comprises the sequence as set forth in SEQ ID NO: 1044 (e.g., ASO-NRas-613). In some aspects, the ASO comprises the sequence as set forth in SEQ ID NO: 1045 (e.g., ASO-NRas-614). In some aspects, the ASO comprises the sequence as set forth in SEQ ID NO: 1046 (e.g., ASO-NRas-615). In some aspects, the ASO comprises the sequence as set forth in SEQ ID NO: 1047 (e.g., ASO-NRas-616). In some aspects, the ASO comprises the sequence as set forth in SEQ ID NO: 1048 (e.g., ASO-NRas-617). In some aspects, the ASO comprises the sequence as set forth in SEQ ID NO: 1049 (e.g., ASO-NRas-618). In some aspects, the ASO comprises the sequence as set forth in SEQ ID NO: 1050 (e.g., ASO-NRas-619). In some aspects, the ASO comprises the sequence as set forth in SEQ ID NO: 1051 (e.g., ASO-NRas-620). In some aspects, the ASO comprises the sequence as set forth in SEQ ID NO: 1052 (e.g., ASO-NRas-622). In some aspects, the ASO comprises the sequence as set forth in SEQ ID NO: 1053 (e.g., ASO-NRas-623). In some aspects, the ASO comprises the sequence as set forth in SEQ ID NO: 1054 (e.g., ASO-NRas-624). In some aspects, the ASO comprises the sequence as set forth in SEQ ID NO: 1055 (e.g., ASO-NRas-690). In some aspects, the ASO comprises the sequence as set forth in SEQ ID NO: 1056 (e.g., ASO-NRas-691). In some aspects, the ASO comprises the sequence as set forth in SEQ ID NO: 1057 (e.g., ASO-NRas-731). In some aspects, the ASO comprises the sequence as set forth in SEQ ID NO: 1058 (e.g., ASO-NRas-835). In some aspects, the ASO comprises the sequence as set forth in SEQ ID NO: 1059 (e.g., ASO-NRas-836). In some aspects, the ASO comprises the sequence as set forth in SEQ ID NO: 1060 (e.g., ASO-NRas-918). In some aspects, the ASO comprises the sequence as set forth in SEQ ID NO: 1061 (e.g., ASO-NRas-922). In some aspects, the ASO comprises the sequence as set forth in SEQ ID NO: 1062 (e.g., ASO-NRas-1072). In some aspects, the ASO comprises the sequence as set forth in SEQ ID NO: 1063 (e.g., ASO-NRas-1074). In some aspects, the ASO comprises the sequence as set forth in SEQ ID NO: 1064 (e.g., ASO-NRas-1313). In some aspects, the ASO comprises the sequence as set forth in SEQ ID NO: 1065 (e.g., ASO-NRas-1475). In some aspects, the ASO comprises the sequence as set forth in SEQ ID NO: 1066 (e.g., ASO-NRas-1617). In some aspects, the ASO comprises the sequence as set forth in SEQ ID NO: 1067 (e.g., ASO-NRas-1618). In some aspects, the ASO comprises the sequence as set forth in SEQ ID NO: 1068 (e.g., ASO-NRas-1621). In some aspects, the ASO comprises the sequence as set forth in SEQ ID NO: 1069 (e.g., ASO-NRas-1622). In some aspects, the ASO comprises the sequence as set forth in SEQ ID NO: 1070 (e.g., ASO-NRas-1623). In some aspects, the ASO comprises the sequence as set forth in SEQ ID NO: 1071 (e.g., ASO-NRas-1956). In some aspects, the ASO comprises the sequence as set forth in SEQ ID NO: 1072 (e.g., ASO-NRas-1957). In some aspects, the ASO comprises the sequence as set forth in SEQ ID NO: 1073 (e.g., ASO-NRas-1958). In some aspects, the ASO comprises the sequence as set forth in SEQ ID NO: 1074 (e.g., ASO-NRas-1959). In some aspects, the ASO comprises the sequence as set forth in SEQ ID NO: 1075 (e.g., ASO-NRas-1962). In some aspects, the ASO comprises the sequence as set forth in SEQ ID NO: 1076 (e.g., ASO-NRas-1965). In some aspects, the ASO comprises the sequence as set forth in SEQ ID NO: 1077 (e.g., ASO-NRas-2113). In some aspects, the ASO comprises the sequence as set forth in SEQ ID NO: 1078 (e.g., ASO-NRas-2114). In some aspects, the ASO comprises the sequence as set forth in SEQ ID NO: 1079 (e.g., ASO-NRas-2122). In some aspects, the ASO comprises the sequence as set forth in SEQ ID NO: 1080 (e.g., ASO-NRas-2417). In some aspects, the ASO comprises the sequence as set forth in SEQ ID NO: 1081 (e.g., ASO-NRas-2419). In some aspects, the ASO comprises the sequence as set forth in SEQ ID NO: 1082 (e.g., ASO-NRas-2759). In some aspects, the ASO comprises the sequence as set forth in SEQ ID NO: 1083 (e.g., ASO-NRas-2760). In some aspects, the ASO comprises the sequence as set forth in SEQ ID NO: 1084 (e.g., ASO-NRas-2761). In some aspects, the ASO comprises the sequence as set forth in SEQ ID NO: 1085 (e.g., ASO-NRas-2886). In some aspects, the ASO comprises the sequence as set forth in SEQ ID NO: 1086 (e.g., ASO-NRas-3557). In some aspects, the ASO comprises the sequence as set forth in SEQ ID NO: 1087 (e.g., ASO-NRas-4027). In some aspects, the ASO comprises the sequence as set forth in SEQ ID NO: 1088 (e.g., ASO-NRas-4082).

[0499] In some aspects the ASO comprises or consists of a sequence at least about 60%, at least about 65%, at least about 70%, at least about 75%, at least about 80%, at least about 85%, at least about 90%, at least about 95%, at least about 96%, at least about 97%, at least about 98%, at least about 99%, or about 100% identical to a sequence set forth in SEQ ID NOs: 989 to 1088. In some aspects the ASO (or contiguous nucleotide portion thereof) is selected from, or comprises, one of the sequences selected from the group consisting of SEQ ID NOs: 989 to 1088 or a region of at least 8, 9, 10, 11, 12, 13, 14, 15, 16, 17, 18, 19, or 20 contiguous nucleotides thereof. In some aspects the ASO (or contiguous nucleotide portion thereof) is selected from, or comprises, one of the sequences selected from the group consisting of SEQ ID NOs: 989 to 1088 or a region of at least 8, 9, 10, 11, 12, 13, 14, 15, 16, 17, 18, 19, or 20 contiguous nucleotides thereof, wherein the ASO (or contiguous nucleotide portion thereof) can optionally comprise one, two, three, or four mismatches when compared to the corresponding NRas transcript. In some aspects the ASO (or contiguous nucleotide portion thereof) is selected from, or comprises, one of the sequences selected from the group consisting of SEQ ID NOs: 989 to 1088 except for 1, 2, 3, 4, 5, 6, 7, 8, 9 or 10 substitutions, wherein the substituted ASO can bind to the NRas transcript. In some aspects the ASO (or contiguous nucleotide portion thereof) is selected from, or comprises, one of the sequences selected from the group consisting of SEQ ID NOs: 989 to 1088 or a region of at least 8, 9, 10, 11, 12, 13, 14, 15, 16, 17, 18, 19, or 20 contiguous nucleotides thereof, wherein the ASO (or contiguous nucleotide portion thereof) can optionally comprise one, two, three, or four additional 5′ and/or 3′ nucleotides complementary to the corresponding NRas transcript.

[0500] In some aspects, binding of an ASO targeting a NRas transcript disclosed herein to a mRNA transcript encoding NRas can reduce expression levels and/or activity levels of NRas.

[0501] II.C.6. ASO Targeting KRAS

[0502] KRAS is known in the art by various names. Such names include: KRAS Proto-Oncogene, GTPase; V-Ki-Ras2 Kirsten Rat Sarcoma 2 Viral Oncogene Homolog; GTPase KRas; C-Ki-Ras; K-Ras 2; KRAS2; RASK2; V-Ki-Ras2 Kirsten Rat Sarcoma Viral Oncogene Homolog; Kirsten Rat Sarcoma Viral Proto-Oncogene; Cellular Transforming Proto-Oncogene; Cellular C-Ki-Ras2 Proto-Oncogene; Transforming Protein P21; PR310 C-K-Ras Oncogene; C-Kirsten-Ras Protein; K-Ras P21 Protein; and Oncogene KRAS2.

[0503] The sequence for the human KRAS gene can be found at chromosomal location 12p12.1 and under publicly available GenBank Accession Number NC_000012 (25,204,789-25,250,936). The genomic sequence for human wild-type KRAS transcript corresponds to the reverse complement of residues 25,204,789-25,250,936 of NC_000012 (SEQ ID NO: 35). The KRAS G12D genomic sequence provided in SEQ ID NO: 31 differs from SEQ ID NO: 35 in that it has a guanine to adenine substitution at nucleotide position 5,587. An exemplary KRAS G12D mRNA sequence is provided in SEQ ID NO: 33, except that the nucleotide “t” in SEQ ID NO: 33 is shown as “u” in the mRNA. The KRAS G12D mRNA provided in SEQ ID NO: 33 differs from the wild-type mRNA sequence (e.g., GenBank Accession No. NM_004985.5; SEQ ID NO: 37) in that it has a guanine to adenine substitution at nucleotide position 225. The sequence for human KRAS protein can be found under publicly available Accession Numbers: P01116 (canonical sequence), A8K8Z5, B0LPF9, P01118, and Q96D10, each of which is incorporated by reference herein in its entirety.

[0504] There are two isoforms of the human KRAS protein (P01116), resulting from alternative splicing. Isoform 2A (Accession Number: P01116-1; SEQ ID NO: 38) is the canonical sequence. It is also known as K-Ras4A. Isoform 2B (Accession Number: P01116-2; also known as K-Ras4B; SEQ ID NO: 36) differs from the canonical sequence as follows: (i) 151-153: RVE→GVD; and (ii) 165-189: QYRLKKISKEEKTPGCVKIKKCIIM (SEQ ID NO:599)→KHKEKMSKDGKKKKKKSKTKCVIM (SEQ ID NO:600). In some aspects, ASOs disclosed herein can reduce or inhibit expression of KRAS protein Isoform 2A, Isoform 2B, or both.

[0505] Natural variants of the human KRAS gene product are known. For example, natural variants of human KRAS protein can contain one or more amino acid substitutions selected from: K5E, K5N, G10GG, G10V, G12A, G12C, G12F, G12I, G12L, G12R, G12S, G12V, G13C, G13D, G13E, G13R, G13V, V14L, L19F, T20M, Q22E, Q22H, Q22K, Q22R, Q25H, N26Y, F28L, E31K, D33E, P34L, P34Q, P34R, 136M, R41K, D57N, T58I, A59T, G60D, G60R, G60S, G60V, Q61A, Q61H, Q61K, Q61L, Q61P, Q61R, E63K, S65N, R68S, Y71H, T74A, L79L, R97I, Q99E, M111L, K117N, K117R, D119G, S122F, T144P, A146P, A146T, A146V, K147E, K147T, R149K, L159S, I163S, R164Q, I183N, 184M, or combinations thereof. Natural variants that are specific to KRAS protein Isoform 2B contain one or more amino acid substitutions selected from: V152G, D153V, F156L, F156L, or combinations thereof. The ASOs of the present disclosure can be designed to reduce or inhibit expression of one or more of the variants of the KRAS protein (e.g., any variants known in the art). In some aspects, a KRAS mutant has an amino acid substitution of G12D. In some aspects, the ASOs of the present disclosure target one or more KRAS mutants. In other aspects, a KRAS mutant that the ASOs target is KRAS G12D (SEQ ID NO: 32). Exemplary sequences for KRAS G12D mRNA and KRAS G12D protein are provided in SEQ ID NO: 33 and SEQ ID NO: 32.

[0506] In some aspects, a target nucleic acid sequence of an ASO disclosed herein comprises one or more regions of a KRAS pre-mRNA. For example, SEQ ID NO: 31 (described above) is identical to a KRAS pre-mRNA sequence except that nucleotide “t” in SEQ ID NO: 31 is shown as “u” in the pre-mRNA. As used herein, the term “target nucleic acid sequence” refers to a nucleic acid sequence that is complementary to an ASO disclosed herein. In certain aspects, the target nucleic acid sequence comprises an exon region of a KRAS protein-encoding nucleic acids or naturally occurring variants thereof, and RNA nucleic acids derived therefrom, e.g., pre-mRNA. In some aspects, the target nucleic acid sequence comprises an intron of a KRAS protein-encoding nucleic acids or naturally occurring variants thereof, and RNA nucleic acids derived therefrom, e.g., pre-mRNA. In further aspects, the target nucleic acid sequence comprises an exon-intron junction of a KRAS protein-encoding nucleic acids or naturally occurring variants thereof, and RNA nucleic acids derived therefrom, e.g., pre-mRNA. In some aspects, for example, when used in research or diagnostics, the target nucleic acid can be a cDNA or a synthetic oligonucleotide derived from DNA or RNA nucleic acid targets described herein. In some aspects, the target nucleic acid comprises an untranslated region of a KRAS protein-encoding nucleic acids or naturally occurring variants thereof, e.g., 5′ UTR, 3′ UTR, or both.

[0507] Accordingly, in some aspects, an ASO disclosed herein hybridizes to an exon region of a KRAS transcript, e.g., SEQ ID NO: 31 or SEQ ID NO: 33. In some aspects, an ASO of the present disclosure hybridizes to an intron region of a KRAS transcript, e.g., SEQ ID NO: 31. In some aspects, an ASO hybridizes to an exon-intron junction of a KRAS transcript, e.g., SEQ ID NO: 31. In some aspects, an ASO of the present disclosure hybridizes to a region within a KRAS transcript (e.g., an intron, exon, or exon-intron junction), e.g., SEQ ID NO: 31, wherein the ASO has a design described elsewhere herein.

[0508] In some aspects, a target nucleic sequence of the ASOs disclosed herein is a KRAS mRNA, e.g., SEQ ID NO: 33. Accordingly, in certain aspects, an ASO disclosed herein can hybridize to one or more regions of a KRAS mRNA. In some aspects, ASOs of the present disclosure target mRNA encoding a particular isoform of KRAS protein. In certain aspects, ASOs disclosed herein can target all isoforms of KRAS protein, including any variants thereof (e.g., those described herein). In some aspects, a KRAS protein that can be targeted by ASOs of the present disclosure comprises a G12D amino acid substitution. Non-limiting exemplary ASOs targeting a KRAS transcript is shown at FIG. 1F.

[0509] In some aspects, the ASO comprises a sequence selected from the group consisting of SEQ ID NOs: 807 to 820. In some aspects, the ASO comprises the sequence as set forth in SEQ ID NO: 807 (e.g., ASO-KRAS-0004). In some aspects, the ASO comprises the sequence as set forth in SEQ ID NO: 808 (e.g., ASO-KRAS-0005). In some aspects, the ASO comprises the sequence as set forth in SEQ ID NO: 809 (e.g., ASO-KRAS-0006). In some aspects, the ASO comprises the sequence as set forth in SEQ ID NO: 810 (e.g., ASO-KRAS-0007). In some aspects, the ASO comprises the sequence as set forth in SEQ ID NO: 811 (e.g., ASO-KRAS-0008). In some aspects, the ASO comprises the sequence as set forth in SEQ ID NO: 812 (e.g., ASO-KRAS-0009). In some aspects, the ASO comprises the sequence as set forth in SEQ ID NO: 813 (e.g., ASO-KRAS-0010). In some aspects, the ASO comprises the sequence as set forth in SEQ ID NO: 814 (e.g., ASO-KRAS-0011). In some aspects, the ASO comprises the sequence as set forth in SEQ ID NO: 815 (e.g., ASO-KRAS-0012). In some aspects, the ASO comprises the sequence as set forth in SEQ ID NO: 816 (e.g., ASO-KRAS-0013). In some aspects, the ASO comprises the sequence as set forth in SEQ ID NO: 817 (e.g., ASO-KRAS-0014). In some aspects, the ASO comprises the sequence as set forth in SEQ ID NO: 818 (e.g., ASO-KRAS-0015). In some aspects, the ASO comprises the sequence as set forth in SEQ ID NO: 819 (e.g., ASO-KRAS-0016). In some aspects, the ASO comprises the sequence as set forth in SEQ ID NO: 820 (e.g., ASO-KRAS-0017). In some aspects, the ASO comprises a sequence selected from the group consisting of SEQ ID NOs: 821-835. In some aspects, the ASO comprises the sequence as set forth in SEQ ID NO: 821 (e.g., ASO-KRAS-0018). In some aspects, the ASO comprises the sequence as set forth in SEQ ID NO: 822 (e.g., ASO-KRAS-0019). In some aspects, the ASO comprises the sequence as set forth in SEQ ID NO: 823 (e.g., ASO-KRAS-0020). In some aspects, the ASO comprises the sequence as set forth in SEQ ID NO: 824 (e.g., ASO-KRAS-0021). In some aspects, the ASO comprises the sequence as set forth in SEQ ID NO: 825 (e.g., ASO-KRAS-0022). In some aspects, the ASO comprises the sequence as set forth in SEQ ID NO: 826 (e.g., ASO-KRAS-0023). In some aspects, the ASO comprises the sequence as set forth in SEQ ID NO: 827 (e.g., ASO-KRAS-0024). In some aspects, the ASO comprises the sequence as set forth in SEQ ID NO: 828 (e.g., ASO-KRAS-0025). In some aspects, the ASO comprises the sequence as set forth in SEQ ID NO: 829 (e.g., ASO-KRAS-0026). In some aspects, the ASO comprises the sequence as set forth in SEQ ID NO: 830 (e.g., ASO-KRAS-0027). In some aspects, the ASO comprises the sequence as set forth in SEQ ID NO: 831 (e.g., ASO-KRAS-0028). In some aspects, the ASO comprises the sequence as set forth in SEQ ID NO: 832 (e.g., ASO-KRAS-0029). In some aspects, the ASO comprises the sequence as set forth in SEQ ID NO: 833 (e.g., ASO-KRAS-0030). In some aspects, the ASO comprises the sequence as set forth in SEQ ID NO: 834 (e.g., ASO-KRAS-0031). In some aspects, the ASO comprises the sequence as set forth in SEQ ID NO: 835 (e.g., ASO-KRAS-0032). In some aspects, the ASO comprises a sequence selected from the group consisting of SEQ ID NOs: 836-851. In some aspects, the ASO comprises the sequence as set forth in SEQ ID NO: 836 (e.g., ASO-KRAS-0033). In some aspects, the ASO comprises the sequence as set forth in SEQ ID NO: 837 (e.g., ASO-KRAS-0034). In some aspects, the ASO comprises the sequence as set forth in SEQ ID NO: 838 (e.g., ASO-KRAS-0035). In some aspects, the ASO comprises the sequence as set forth in SEQ ID NO: 839 (e.g., ASO-KRAS-0036). In some aspects, the ASO comprises the sequence as set forth in SEQ ID NO: 840 (e.g., ASO-KRAS-0037). In some aspects, the ASO comprises the sequence as set forth in SEQ ID NO: 841 (e.g., ASO-KRAS-0038). In some aspects, the ASO comprises the sequence as set forth in SEQ ID NO: 842 (e.g., ASO-KRAS-0039). In some aspects, the ASO comprises the sequence as set forth in SEQ ID NO: 843 (e.g., ASO-KRAS-0040). In some aspects, the ASO comprises the sequence as set forth in SEQ ID NO: 844 (e.g., ASO-KRAS-0041). In some aspects, the ASO comprises the sequence as set forth in SEQ ID NO: 845 (e.g., ASO-KRAS-0042). In some aspects, the ASO comprises the sequence as set forth in SEQ ID NO: 846 (e.g., ASO-KRAS-0043). In some aspects, the ASO comprises the sequence as set forth in SEQ ID NO: 847 (e.g., ASO-KRAS-0044). In some aspects, the ASO comprises the sequence as set forth in SEQ ID NO: 848 (e.g., ASO-KRAS-0045). In some aspects, the ASO comprises the sequence as set forth in SEQ ID NO: 849 (e.g., ASO-KRAS-0046). In some aspects, the ASO comprises the sequence as set forth in SEQ ID NO: 850 (e.g., ASO-KRAS-0047). In some aspects, the ASO comprises the sequence as set forth in SEQ ID NO: 851 (e.g., ASO-KRAS-0048). In some aspects, the ASO comprises a sequence selected from the group consisting of SEQ ID NOs: 852-868. In some aspects, the ASO comprises the sequence as set forth in SEQ ID NO: 852 (e.g., ASO-KRAS-0049). In some aspects, the ASO comprises the sequence as set forth in SEQ ID NO: 853 (e.g., ASO-KRAS-0050). In some aspects, the ASO comprises the sequence as set forth in SEQ ID NO: 854 (e.g., ASO-KRAS-0051). In some aspects, the ASO comprises the sequence as set forth in SEQ ID NO: 855 (e.g., ASO-KRAS-0052). In some aspects, the ASO comprises the sequence as set forth in SEQ ID NO: 856 (e.g., ASO-KRAS-0053). In some aspects, the ASO comprises the sequence as set forth in SEQ ID NO: 857 (e.g., ASO-KRAS-0054). In some aspects, the ASO comprises the sequence as set forth in SEQ ID NO: 858 (e.g., ASO-KRAS-0055). In some aspects, the ASO comprises the sequence as set forth in SEQ ID NO: 859 (e.g., ASO-KRAS-0056). In some aspects, the ASO comprises the sequence as set forth in SEQ ID NO: 860 (e.g., ASO-KRAS-0057). In some aspects, the ASO comprises the sequence as set forth in SEQ ID NO: 861 (e.g., ASO-KRAS-0058). In some aspects, the ASO comprises the sequence as set forth in SEQ ID NO: 862 (e.g., ASO-KRAS-0059). In some aspects, the ASO comprises the sequence as set forth in SEQ ID NO: 863 (e.g., ASO-KRAS-0060). In some aspects, the ASO comprises the sequence as set forth in SEQ ID NO: 864 (e.g., ASO-KRAS-0061). In some aspects, the ASO comprises the sequence as set forth in SEQ ID NO: 865 (e.g., ASO-KRAS-0062). In some aspects, the ASO comprises the sequence as set forth in SEQ ID NO: 866 (e.g., ASO-KRAS-0063). In some aspects, the ASO comprises the sequence as set forth in SEQ ID NO: 867 (e.g., ASO-KRAS-0064). In some aspects, the ASO comprises the sequence as set forth in SEQ ID NO: 868 (e.g., ASO-KRAS-0065). In some aspects, the ASO comprises a sequence selected from the group consisting of SEQ ID NOs: 869-888. In some aspects, the ASO comprises the sequence as set forth in SEQ ID NO: 869 (e.g., ASO-KRAS-0066). In some aspects, the ASO comprises the sequence as set forth in SEQ ID NO: 870 (e.g., ASO-KRAS-0067). In some aspects, the ASO comprises the sequence as set forth in SEQ ID NO: 871 (e.g., ASO-KRAS-0068). In some aspects, the ASO comprises the sequence as set forth in SEQ ID NO: 872 (e.g., ASO-KRAS-0069). In some aspects, the ASO comprises the sequence as set forth in SEQ ID NO: 873 (e.g., ASO-KRAS-0070). In some aspects, the ASO comprises the sequence as set forth in SEQ ID NO: 874 (e.g., ASO-KRAS-0071). In some aspects, the ASO comprises the sequence as set forth in SEQ ID NO: 875 (e.g., ASO-KRAS-0072). In some aspects, the ASO comprises the sequence as set forth in SEQ ID NO: 876 (e.g., ASO-KRAS-0073). In some aspects, the ASO comprises the sequence as set forth in SEQ ID NO: 877 (e.g., ASO-KRAS-0074). In some aspects, the ASO comprises the sequence as set forth in SEQ ID NO: 878 (e.g., ASO-KRAS-0075). In some aspects, the ASO comprises the sequence as set forth in SEQ ID NO: 879 (e.g., ASO-KRAS-0076). In some aspects, the ASO comprises the sequence as set forth in SEQ ID NO: 880 (e.g., ASO-KRAS-0077). In some aspects, the ASO comprises the sequence as set forth in SEQ ID NO: 881 (e.g., ASO-KRAS-0078). In some aspects, the ASO comprises the sequence as set forth in SEQ ID NO: 882 (e.g., ASO-KRAS-0079). In some aspects, the ASO comprises the sequence as set forth in SEQ ID NO: 883 (e.g., ASO-KRAS-0080). In some aspects, the ASO comprises the sequence as set forth in SEQ ID NO: 884 (e.g., ASO-KRAS-0081). In some aspects, the ASO comprises the sequence as set forth in SEQ ID NO: 885 (e.g., ASO-KRAS-0082). In some aspects, the ASO comprises the sequence as set forth in SEQ ID NO: 886 (e.g., ASO-KRAS-0083). In some aspects, the ASO comprises the sequence as set forth in SEQ ID NO: 887 (e.g., ASO-KRAS-0084). In some aspects, the ASO comprises the sequence as set forth in SEQ ID NO: 888 (e.g., ASO-KRAS-0085).

[0510] In some aspects the ASO comprises or consists of a sequence at least about 60%, at least about 65%, at least about 70%, at least about 75%, at least about 80%, at least about 85%, at least about 90%, at least about 95%, at least about 96%, at least about 97%, at least about 98%, at least about 99%, or about 100% identical to a sequence set forth in SEQ ID NOs: 807 to 888. In some aspects the ASO (or contiguous nucleotide portion thereof) is selected from, or comprises, one of the sequences selected from the group consisting of SEQ ID NOs: 807 to 888 or a region of at least 8, 9, 10, 11, 12, 13, 14, 15, 16, 17, 18, 19, or 20 contiguous nucleotides thereof. In some aspects the ASO (or contiguous nucleotide portion thereof) is selected from, or comprises, one of the sequences selected from the group consisting of SEQ ID NOs: 807 to 888 or a region of at least 8, 9, 10, 11, 12, 13, 14, 15, 16, 17, 18, 19, or 20 contiguous nucleotides thereof, wherein the ASO (or contiguous nucleotide portion thereof) can optionally comprise one, two, three, or four mismatches when compared to the corresponding KRAS transcript. In some aspects the ASO (or contiguous nucleotide portion thereof) is selected from, or comprises, one of the sequences selected from the group consisting of SEQ ID NOs: 807 to 888 except for 1, 2, 3, 4, 5, 6, 7, 8, 9 or 10 substitutions, wherein the substituted ASO can bind to the KRAS transcript. In some aspects the ASO (or contiguous nucleotide portion thereof) is selected from, or comprises, one of the sequences selected from the group consisting of SEQ ID NOs: 807 to 888 or a region of at least 8, 9, 10, 11, 12, 13, 14, 15, 16, 17, 18, 19, or 20 contiguous nucleotides thereof, wherein the ASO (or contiguous nucleotide portion thereof) can optionally comprise one, two, three, or four additional 5′ and/or 3′ nucleotides complementary to the corresponding KRAS transcript.

[0511] In some aspects, binding of an ASO targeting a KRAS transcript disclosed herein to a mRNA transcript encoding KRAS can reduce expression levels and/or activity levels of KRAS.

[0512] II.C.7 ASO Targeting Pmp22

[0513] Peripheral myelin protein 22 (PMP22) is also known as growth arrest-specific protein 3 (GAS-3), is encoded by the PMP22 gene. PMP22 is a 22 kDa transmembrane glycoprotein made up of 160 amino acids, and is mainly expressed in the Schwann cells of the peripheral nervous system. Schwann cells show high expression of PMP22, where it can constitute 2-5% of total protein content in compact myelin. Compact myelin is the bulk of the peripheral neuron's myelin sheath, a protective fatty layer that provides electrical insulation for the neuronal axon. The level of PMP22 expression is relatively low in the central nervous system of adults.

[0514] In humans, the PMP22 gene is located on chromosome 17p11.2 and spans approximately 40 kb. The gene contains six exons conserved in both humans and rodents, two of which are 5′ untranslated exons (1a and 1b) and result in two different RNA transcripts with identical coding sequences. The two transcripts differ in their 5′ untranslated regions and have their own promoter regulating expression. The remaining exons (2 to 5) include the coding region of the PMP22 gene, and are joined together after post-transcriptional modification (i.e. alternative splicing). The PMP22 protein is characterized by four transmembrane domains, two extracellular loops (ECL1 and ECL2), and one intracellular loop. ECL1 has been suggested to mediate a homophilic interaction between two PMP22 proteins, whereas ECL2 has been shown to mediate a heterophilic interaction between PMP22 protein and Myelin protein zero (MPZ or MP0).

[0515] PMP22 plays an essential role in the formation and maintenance of compact myelin. When Schwann cells come into contact with a neuronal axon, expression of PMP22 is significantly up-regulated, whereas PMP22 is down-regulated during axonal degeneration or transection. PMP22 has shown association with zonula-occludens 1 and occludin, proteins that are involved in adhesion with other cells and the extracellular matrix, and also support functioning of myelin. Along with cell adhesion function, PMP22 is also up-regulated during Schwann cell proliferation, suggesting a role in cell-cycle regulation. PMP22 is detectable in non-neural tissues, where its expression has been shown to serve as growth-arrest-specific (gas-3) function.

[0516] Improper gene dosage of the PMP22 gene can cause aberrant protein synthesis and function of myelin sheath. Since the components of myelin are stoichiometrically set, any irregular expression of a component can cause destabilization of myelin and neuropathic disorders. Alterations of PMP22 gene expression are associated with a variety of neuropathies, such as Charcot-Marie-Tooth type 1A (CMT1A), Dejerine-Sottas disease, and Hereditary Neuropathy with Liability to Pressure Palsy (HNPP). Too much PMP22 (e.g. caused by gene duplication) results in CMT1A. Gene duplication of PMP22 is the most common genetic cause of CMT where the overproduction of PMP22 results in defects in multiple signaling pathways and dysfunction of transcriptional factors like KNOX20, SOX10 and EGR2.

[0517] The sequence for the human PMP22 gene can be found under publicly available as NCBI RefSeq Acc. No. NM_000304. Alternative RefSeq mRNA transcripts have accession numbers NM_001281455, NM-001281456, NM-153321, and NM_153322, respectively. The human PMP22 gene is found at chromosome location 17p12 at 15,229,777-15,265,326.

[0518] The sequence for the human PMP22 pre-mRNA transcript (SEQ ID NO: 264) corresponds to the reverse complement of residues 15,229,777-15,265,326, of chromosome location 17p12. The PMP22 mRNA sequence (GenBank Accession No. NM_000304.4) is provided in SEQ ID NO: 58. The sequence for human PMP22 protein can be found under publicly available Uniprot Accession Number Q01453 (canonical sequence, SEQ ID NO: 60). Potential PMP22 isoforms have Uniprot Accession Numbers A8MU75, J3KQW0, A0A2R8Y5L5, J3KT36, and J3QS08, respectively. The publicly available contents of the database entries corresponding to accession numbers disclosed herein are incorporated by reference in their entireties.

[0519] Natural variants of the human PMP22 gene product are known. For example, natural variants of human PMP22 protein can contain one or more amino acid substitutions selected from L16P, S22F, Δ25-26, D37V, V65F, S72L, S79C, G93R, L105R, G107V, T118N, L147R, H12Q, L16P, L19P, M69K, L71P, S72L, S72P, S72W, S76I, S79P, L80P, L80R, Δ84, G100E, G100R, L105R, C109R, S149R, G150C, G150D, R157W, S22F, V30M, A67T, S23T, W28R, A67P, Δ115-118, and any combination thereof.

[0520] The ASOs of the present disclosure can be designed to reduce or inhibit expression of the natural variants of the PMP22 protein.

[0521] An example of a target nucleic acid sequence of the ASOs is PMP22 pre-mRNA. SEQ ID NO: 58 represents a human PMP22 genomic sequence (i.e., reverse complement of nucleotides 15,229,777-15,265,326, complement, of chromosome 17p12). SEQ ID NO: 58 is identical to a PMP22 pre-mRNA sequence except that nucleotide “t” in SEQ ID NO: 58 is shown as “u” in pre-mRNA.

[0522] In some aspects, the ASO comprises a contiguous nucleotide sequence of 10 to 30 nucleotides in length that is complementary to a nucleic acid sequence within nucleotides 1 to 1828 of a PMP22 transcript corresponding to a nucleotide sequence as set forth in SEQ ID NO: 264 (PMP22 full mRNA transcript) or nucleotides 208 to 690 of a PMP22 transcript corresponding to a nucleotide sequence as set forth in SEQ ID NO: 59 (PMP22 coding sequence).

[0523] In some aspects, the contiguous nucleotide sequence is at least about 80%, at least about 85%, at least about 90%, at least about 95%, or about 100% complementary to the nucleic acid sequence within the PMP22 transcript. In some aspects, the ASO is capable of reducing PMP22 protein expression in a human cell (e.g., a Schwan cell), wherein the human cell expresses the PMP22 protein.

[0524] In some aspects, the PMP22 protein expression is reduced by at least about 30%, at least about 35%, at least about 40%, at least about 45%, at least about 50%, at least about 55%, at least about 60%, at least about 65%, at least about 70%, at least about 75%, at least about 80%, at least about 85%, at least about 90%, at least about 95%, or about 100% compared to PMP22 protein expression in a human cell that is not exposed to the ASO.

[0525] In some aspects, the ASO is capable of reducing a level of PMP22 mRNA in a human cell (e.g., an immune cell), wherein the human cell expresses the PMP22 mRNA. In some aspects, the level of PMP22 mRNA is reduced by at least about 30%, at least about 35%, at least about 40%, at least about 45%, at least about 50%, at least about 55%, at least about 60%, at least about 65%, at least about 70%, at least about 75%, at least about 80%, at least about 85%, at least about 90%, at least about 95%, or about 100% compared to the level of the PMP22 mRNA in a human cell that is not exposed to the ASO.

[0526] In certain aspects, the target nucleic acid comprises an intron of a PMP22 protein-encoding nucleic acids or naturally occurring variants thereof, and RNA nucleic acids derived therefrom, e.g., pre-mRNA. In other aspects, the target nucleic acid comprises an exon region of a PMP22 protein-encoding nucleic acids or naturally occurring variants thereof, and RNA nucleic acids derived therefrom, e.g., pre-mRNA. In yet other aspects, the target nucleic acid comprises an exon-intron junction of a PMP22 protein-encoding nucleic acids or naturally occurring variants thereof, and RNA nucleic acids derived therefrom, e.g., pre-mRNA. In some aspects, for example when used in research or diagnostics the target nucleic acid can be a cDNA or a synthetic oligonucleotide derived from the above DNA or RNA nucleic acid targets. The human PMP22 coding sequence (CDS) is shows as SEQ ID NO:59, and protein sequence encoded by the coding sequence in the PMP22 pre-mRNA is shown as SEQ ID NO: 60. In other aspects, the target nucleic acid comprises an untranslated region of a PMP22 protein-encoding nucleic acids or naturally occurring variants thereof, e.g., 5′ UTR, 3′ UTR, or both.

[0527] In some aspects, an ASO of the disclosure hybridizes to a region within the introns of a PMP22 transcript, e.g., SEQ ID NO: 58. In certain aspects, an ASO of the disclosure hybridizes to a region within the exons of a PMP22 transcript, e.g., SEQ ID NO: 58. In other aspects, an ASO of the disclosure hybridizes to a region within the exon-intron junction of a PMP22 transcript, e.g., SEQ ID NO: 58.

[0528] In some aspects, the ASO comprises a contiguous nucleotide sequence (e.g., 10 to 30 nucleotides in length, e.g., 20 nucleotides in length) that are complementary to a nucleic acid sequence within a PMP22 transcript, e.g., a region corresponding to SEQ ID NO: 264. In some aspects, the ASO comprises a contiguous nucleotide sequence that hybridizes to a nucleic acid sequence, or a region within the sequence, of a PMP22 transcript (target region), wherein the contiguous nucleotide sequence is complementary to a nucleic acid sequence within (i) a 5′ untranslated region (UTR); (ii) a coding region; or (iii) a 3′ UTR of the PMP22 transcript. In some aspects, the contiguous nucleotide sequence is complementary to a nucleic acid sequence comprising (i) nucleotides 1-173 of SEQ ID NO: 58 (exon 1); (ii) nucleotides 174-285 of SEQ ID NO: 58 (exon 2); (iii) nucleotides 286-385 of SEQ ID NO: 58 (exon 3); (iv) nucleotides 386-526 of SEQ ID NO: 58 (exon 4); (v) 527-1828 of SEQ ID NO: 58 (exon 5); (vi) 200-300 of SEQ ID NO: 58, (vii) nucleotides 200-400 of SEQ ID NO: 58; (viii) nucleotides 500-600 of SEQ ID NO: 58; (ix) nucleotides 600-700 of SEQ ID NO: 58; (x) nucleotides 600-800 of SEQ ID NO: 58; (xi) 1200-1300 of SEQ ID NO: 58; (xii) 400-600 of SEQ ID NO: 58; (xiii) nucleotides 800-1000 of SEQ ID NO: 58; (xiv) nucleotides 1000-1200 of SEQ ID NO: 58; (xv) nucleotides 1200-1400 of SEQ ID NO: 58; (xvi) nucleotides 1400-1600 of SEQ ID NO: 58; or (xvii) 1600-1800 of SEQ ID NO:58.

[0529] In some aspects, the contiguous nucleotide sequence is complementary to a nucleic acid sequence comprising nucleotides 152-168 (SEQ ID NO: 62), 225-244 (SEQ ID NO:63), 227-246 (SEQ ID NO:64), 235-254 (SEQ ID NO:65), 265-284 (SEQ ID NO:66), 271-290 (SEQ ID NO:67), 380-399 (SEQ ID NO:68), 383-402 (SEQ ID NO:69), 385-404 (SEQ ID NO:70), 418-437 (SEQ ID NO:71), 479-498 (SEQ ID NO:72), 583-602 (SEQ ID NO:73), 671-690 (SEQ ID NO:74), 672-691 (SEQ ID NO:75), 673-692 (SEQ ID NO:76), 674-693 (SEQ ID NO:77), 675-691 (SEQ ID NO:78), 676-691 (SEQ ID NO:79), 678-693 (SEQ ID NO:80), 939-958 (SEQ ID NO:81), 940-959 (SEQ ID NO:82), 1127-1146 (SEQ ID NO:83), 1130-1149 (SEQ ID NO:84), 1293-1312 (SEQ ID NO:85), 1316-1335 (SEQ ID NO:86), 1317-1336 (SEQ ID NO:87), 1319-1338 (SEQ ID NO:88), 1365-1384 (SEQ ID NO:89), 1404-1423 (SEQ ID NO:90), 1604-1623 (SEQ ID NO:91), 1605-1624 (SEQ ID NO:92), 1611-1630 (SEQ ID NO:93), 1612-1631 (SEQ ID NO:94), or 1679-1688 (SEQ ID NO:263) of SEQ ID NO: 58. In some aspects, the contiguous nucleotide sequence comprises a nucleotide sequence complementary to a nucleic acid sequence comprising nucleotides 152-168 (SEQ ID NO:62), 235-254 (SEQ ID NO:65), 385-404 (SEQ ID NO:70), 479-498 (SEQ ID NO:72), 672-691 (SEQ ID NO:75), 675-691 (SEQ ID NO:78), 939-958 (SEQ ID NO:81), 1130-1149 (SEQ ID NO:84), 1293-1312 (SEQ ID NO:85), 1365-1384 (SEQ ID NO:89), 1404-1423 (SEQ ID NO:90), or 1605-1624 (SEQ ID NO:92) of SEQ ID NO: 58.

[0530] In some aspects, the target region corresponds to a 16-mer nucleotide sequence corresponding to positions 208-223, 209-224, 210-225, 211-226, 212-227, 213-228, 214-229, 215-230, 216-231, 217-232, 218-233, 219-234, 220-235, 221-236, 222-237, 223-238, 224-239, 225-240, 226-241, 227-242, 228-243, 229-244, 230-245, 231-246, 232-247, 233-248, 234-249, 235-250, 236-251, 237-252, 238-253, 239-254, 240-255, 241-256, 242-257, 243-258, 244-259, 245-260, 246-261, 247-262, 248-263, 249-264, 250-265, 251-266, 252-267, 253-268, 254-269, 255-270, 256-271, 257-272, 258-273, 259-274, 260-275, 261-276, 262-277, 263-278, 264-279, 265-280, 266-281, 267-282, 268-283, 269-284, 270-285, 271-286, 272-287, 273-288, 274-289, 275-290, 276-291, 277-292, 278-293, 279-294, 280-295, 281-296, 282-297, 283-298, 284-299, 285-300, 286-301, 287-302, 288-303, 289-304, 290-305, 291-306, 292-307, 293-308, 294-309, 295-310, 296-311, 297-312, 298-313, 299-314, 300-315, 301-316, 302-317, 303-318, 304-319, 305-320, 306-321, 307-322, 308-323, 309-324, 310-325, 311-326, 312-327, 313-328, 314-329, 315-330, 316-331, 317-332, 318-333, 319-334, 320-335, 321-336, 322-337, 323-338, 324-339, 325-340, 326-341, 327-342, 328-343, 329-344, 330-345, 331-346, 332-347, 333-348, 334-349, 335-350, 336-351, 337-352, 338-353, 339-354, 340-355, 341-356, 342-357, 343-358, 344-359, 345-360, 346-361, 347-362, 348-363, 349-364, 350-365, 351-366, 352-367, 353-368, 354-369, 355-370, 356-371, 357-372, 358-373, 359-374, 360-375, 361-376, 362-377, 363-378, 364-379, 365-380, 366-381, 367-382, 368-383, 369-384, 370-385, 371-386, 372-387, 373-388, 374-389, 375-390, 376-391, 377-392, 378-393, 379-394, 380-395, 381-396, 382-397, 383-398, 384-399, 385-400, 386-401, 387-402, 388-403, 389-404, 390-405, 391-406, 392-407, 393-408, 394-409, 395-410, 396-411, 397-412, 398-413, 399-414, 400-415, 401-416, 402-417, 403-418, 404-419, 405-420, 406-421, 407-422, 408-423, 409-424, 410-425, 411-426, 412-427, 413-428, 414-429, 415-430, 416-431, 417-432, 418-433, 419-434, 420-435, 421-436, 422-437, 423-438, 424-439, 425-440, 426-441, 427-442, 428-443, 429-444, 430-445, 431-446, 432-447, 433-448, 434-449, 435-450, 436-451, 437-452, 438-453, 439-454, 440-455, 441-456, 442-457, 443-458, 444-459, 445-460, 446-461, 447-462, 448-463, 449-464, 450-465, 451-466, 452-467, 453-468, 454-469, 455-470, 456-471, 457-472, 458-473, 459-474, 460-475, 461-476, 462-477, 463-478, 464-479, 465-480, 466-481, 467-482, 468-483, 469-484, 470-485, 471-486, 472-487, 473-488, 474-489, 475-490, 476-491, 477-492, 478-493, 479-494, 480-495, 481-496, 482-497, 483-498, 484-499, 485-500, 486-501, 487-502, 488-503, 489-504, 490-505, 491-506, 492-507, 493-508, 494-509, 495-510, 496-511, 497-512, 498-513, 499-514, 500-515, 501-516, 502-517, 503-518, 504-519, 505-520, 506-521, 507-522, 508-523, 509-524, 510-525, 511-526, 512-527, 513-528, 514-529, 515-530, 516-531, 517-532, 518-533, 519-534, 520-535, 521-536, 522-537, 523-538, 524-539, 525-540, 526-541, 527-542, 528-543, 529-544, 530-545, 531-546, 532-547, 533-548, 534-549, 535-550, 536-551, 537-552, 538-553, 539-554, 540-555, 541-556, 542-557, 543-558, 544-559, 545-560, 546-561, 547-562, 548-563, 549-564, 550-565, 551-566, 552-567, 553-568, 554-569, 555-570, 556-571, 557-572, 558-573, 559-574, 560-575, 561-576, 562-577, 563-578, 564-579, 565-580, 566-581, 567-582, 568-583, 569-584, 570-585, 571-586, 572-587, 573-588, 574-589, 575-590, 576-591, 577-592, 578-593, 579-594, 580-595, 581-596, 582-597, 583-598, 584-599, 585-600, 586-601, 587-602, 588-603, 589-604, 590-605, 591-606, 592-607, 593-608, 594-609, 595-610, 596-611, 597-612, 598-613, 599-614, 600-615, 601-616, 602-617, 603-618, 604-619, 605-620, 606-621, 607-622, 608-623, 609-624, 610-625, 611-626, 612-627, 613-628, 614-629, 615-630, 616-631, 617-632, 618-633, 619-634, 620-635, 621-636, 622-637, 623-638, 624-639, 625-640, 626-641, 627-642, 628-643, 629-644, 630-645, 631-646, 632-647, 633-648, 634-649, 635-650, 636-651, 637-652, 638-653, 639-654, 640-655, 641-656, 642-657, 643-658, 644-659, 645-660, 646-661, 647-662, 648-663, 649-664, 650-665, 651-666, 652-667, 653-668, 654-669, 655-670, 656-671, 657-672, 658-673, 659-674, 660-675, 661-676, 662-677, 663-678, 664-679, 665-680, 666-681, 667-682, 668-683, 669-684, 670-685, 671-686, 672-687, 673-688, 674-689, 675-690 of SEQ ID NO: 58.

[0531] In some aspects, the target region corresponds to a 16-mer nucleotide between positions 208 and 690 of SEQ ID NO: 58. In some aspects, the target region corresponds to a 17-mer nucleotide between positions 208 and 690 of SEQ ID NO: 58. In some aspects, the target region corresponds to a 18-mer nucleotide sequence between positions 208 and 690 of SEQ ID NO: 58. In some aspects, the target region corresponds to a 19-mer nucleotide sequence between positions 208 and 690 of SEQ ID NO: 58. In some aspects, the target region corresponds to a 20-mer nucleotide sequence between positions 208 and 690 of SEQ ID NO: 58. In some aspects, the target region corresponds to a 16-mer, 17-mer, 18-mer, 19-mer or 20-mer target region disclosed above ±10, ±20, ±30, ±40, ±50, ±60, ±70, ±80, or ±90 nucleotides at the 3′ end and/or the 5′ end.

[0532] In some aspects, the ASO is not ATCTTCAATCAACAGC (SEQ ID NO: 61).

[0533] In some aspects, the ASO is ATCTTCAATCAACAGC (SEQ ID NO: 61).

[0534] In some aspects, the ASO of the present disclosure hybridizes to multiple target regions within the PMP22 transcript (e.g., genomic sequence, SEQ ID NO: 58). In some aspects, the ASO hybridizes to two different target regions within the PMP22 transcript. In some aspects, the ASO hybridizes to three different target regions within the PMP22 transcript. In some aspects, the ASOs that hybridizes to multiple regions within the PMP22 transcript (e.g., genomic sequence, SEQ ID NO: 58) are more potent (e.g., having lower EC50) at reducing PMP22 expression compared to ASOs that hybridizes to a single region within the PMP22 transcript (e.g., genomic sequence, SEQ ID NO: 58).

[0535] In some aspects, the ASO is capable of down-regulating (e.g., reducing or removing) expression of the PMP22 mRNA or protein both in humans and in rodents (e.g., mice or rats). In some aspects, any ASO described herein is part of a conjugate, comprising the ASO covalently linked to at least one non-nucleotide or non-polynucleotide.

[0536] The ASOs of the disclosure comprise a contiguous nucleotide sequence which corresponds to the complement of a region of PMP22 transcript, e.g., a nucleotide sequence corresponding to SEQ ID NO: 58.

[0537] In some aspects, the nucleotide sequence of the ASOs of the disclosure or the contiguous nucleotide sequence has at least about 80% sequence identity to a sequence selected from SEQ ID NOs: 62-95 or 201-270 (i.e., the antisense sequences in FIGS. 28 and 29), such as at least about 80%, at least about 85%, at least about 90%, at least about 91%, at least about 92%, at least about 93%, at least about 94%, at least about 95%, at least about 96% sequence identity, at least about 97% sequence identity, at least about 98% sequence identity, at least about 99% sequence identity, such as about 100% sequence identity (homologous). In some aspects, the ASO has a design described elsewhere herein or a chemical structure shown elsewhere herein (i.e., the antisense sequences in FIGS. 28 and 29).

[0538] In some aspects the ASO (or contiguous nucleotide portion thereof) is selected from, or comprises, one of the sequences selected from the group consisting of SEQ ID NOs: 62-95 or 201-270 to PMP22 or a region of at least 10 contiguous nucleotides thereof, wherein the ASO (or contiguous nucleotide portion thereof) can optionally comprise one, two, three, or four mismatches when compared to the corresponding PMP22 transcript. Non-limiting exemplary ASOs targeting PMP22 gene are shown in FIGS. 28 and 29.

[0539] In some aspects, the ASO comprises the sequence as set forth in SEQ ID NO: 65. In some aspects, the ASO comprises the sequence as set forth in SEQ ID NO: 66. In some aspects, the ASO comprises the sequence as set forth in SEQ ID NO: 67. In some aspects, the ASO comprises the sequence as set forth in SEQ ID NO: 68. In some aspects, the ASO comprises the sequence as set forth in SEQ ID NO: 69. In some aspects, the ASO comprises the sequence as set forth in SEQ ID NO: 70. In some aspects, the ASO comprises the sequence as set forth in SEQ ID NO: 71. In some aspects, the ASO comprises the sequence as set forth in SEQ ID NO: 72. In some aspects, the ASO comprises the sequence as set forth in SEQ ID NO: 73. In some aspects, the ASO comprises the sequence as set forth in SEQ ID NO: 74. In some aspects, the ASO comprises the sequence as set forth in SEQ ID NO: 75. In some aspects, the ASO comprises the sequence as set forth in SEQ ID NO: 76. In some aspects, the ASO comprises the sequence as set forth in SEQ ID NO: 77. In some aspects, the ASO comprises the sequence as set forth in SEQ ID NO: 78. In some aspects, the ASO comprises the sequence as set forth in SEQ ID NO: 79. In some aspects, the ASO comprises the sequence as set forth in SEQ ID NO: 80. In some aspects, the ASO comprises the sequence as set forth in SEQ ID NO: 81. In some aspects, the ASO comprises the sequence as set forth in SEQ ID NO: 82. In some aspects, the ASO comprises the sequence as set forth in SEQ ID NO: 83. In some aspects, the ASO comprises the sequence as set forth in SEQ ID NO: 84. In some aspects, the ASO comprises the sequence as set forth in SEQ ID NO: 85. In some aspects, the ASO comprises the sequence as set forth in SEQ ID NO: 86. In some aspects, the ASO comprises the sequence as set forth in SEQ ID NO: 87. In some aspects, the ASO comprises the sequence as set forth in SEQ ID NO: 88. In some aspects, the ASO comprises the sequence as set forth in SEQ ID NO: 89. In some aspects, the ASO comprises the sequence as set forth in SEQ ID NO: 90. In some aspects, the ASO comprises the sequence as set forth in SEQ ID NO: 91. In some aspects, the ASO comprises the sequence as set forth in SEQ ID NO: 92. In some aspects, the ASO comprises the sequence as set forth in SEQ ID NO: 93. In some aspects, the ASO comprises the sequence as set forth in SEQ ID NO: 94. In some aspects, the ASO comprises the sequence as set forth in SEQ ID NO: 95. In some aspects, the ASO comprises the sequence as set forth in SEQ ID NO: 201. In some aspects, the ASO comprises the sequence as set forth in SEQ ID NO: 202. In some aspects, the ASO comprises the sequence as set forth in SEQ ID NO: 203. In some aspects, the ASO comprises the sequence as set forth in SEQ ID NO: 204. In some aspects, the ASO comprises the sequence as set forth in SEQ ID NO: 205. In some aspects, the ASO comprises the sequence as set forth in SEQ ID NO: 206. In some aspects, the ASO comprises the sequence as set forth in SEQ ID NO: 207. In some aspects, the ASO comprises the sequence as set forth in SEQ ID NO: 208. In some aspects, the ASO comprises the sequence as set forth in SEQ ID NO: 209. In some aspects, the ASO comprises the sequence as set forth in SEQ ID NO: 210. In some aspects, the ASO comprises the sequence as set forth in SEQ ID NO: 211. In some aspects, the ASO comprises the sequence as set forth in SEQ ID NO: 212. In some aspects, the ASO comprises the sequence as set forth in SEQ ID NO: 213. In some aspects, the ASO comprises the sequence as set forth in SEQ ID NO: 214. In some aspects, the ASO comprises the sequence as set forth in SEQ ID NO: 215. In some aspects, the ASO comprises the sequence as set forth in SEQ ID NO: 216. In some aspects, the ASO comprises the sequence as set forth in SEQ ID NO: 217. In some aspects, the ASO comprises the sequence as set forth in SEQ ID NO: 218. In some aspects, the ASO comprises the sequence as set forth in SEQ ID NO: 219. In some aspects, the ASO comprises the sequence as set forth in SEQ ID NO: 220. In some aspects, the ASO comprises the sequence as set forth in SEQ ID NO: 221. In some aspects, the ASO comprises the sequence as set forth in SEQ ID NO: 222. In some aspects, the ASO comprises the sequence as set forth in SEQ ID NO: 223. In some aspects, the ASO comprises the sequence as set forth in SEQ ID NO: 224. In some aspects, the ASO comprises the sequence as set forth in SEQ ID NO: 225. In some aspects, the ASO comprises the sequence as set forth in SEQ ID NO: 226. In some aspects, the ASO comprises the sequence as set forth in SEQ ID NO: 227. In some aspects, the ASO comprises the sequence as set forth in SEQ ID NO: 228. In some aspects, the ASO comprises the sequence as set forth in SEQ ID NO: 229. In some aspects, the ASO comprises the sequence as set forth in SEQ ID NO: 230. In some aspects, the ASO comprises the sequence as set forth in SEQ ID NO: 231. In some aspects, the ASO comprises the sequence as set forth in SEQ ID NO: 232. In some aspects, the ASO comprises the sequence as set forth in SEQ ID NO: 233. In some aspects, the ASO comprises the sequence as set forth in SEQ ID NO: 234. In some aspects, the ASO comprises the sequence as set forth in SEQ ID NO: 235. In some aspects, the ASO comprises the sequence as set forth in SEQ ID NO: 236. In some aspects, the ASO comprises the sequence as set forth in SEQ ID NO: 237. In some aspects, the ASO comprises the sequence as set forth in SEQ ID NO: 238. In some aspects, the ASO comprises the sequence as set forth in SEQ ID NO: 239. In some aspects, the ASO comprises the sequence as set forth in SEQ ID NO: 240. In some aspects, the ASO comprises the sequence as set forth in SEQ ID NO: 241. In some aspects, the ASO comprises the sequence as set forth in SEQ ID NO: 242. In some aspects, the ASO comprises the sequence as set forth in SEQ ID NO: 243. In some aspects, the ASO comprises the sequence as set forth in SEQ ID NO: 244. In some aspects, the ASO comprises the sequence as set forth in SEQ ID NO: 245. In some aspects, the ASO comprises the sequence as set forth in SEQ ID NO: 246. In some aspects, the ASO comprises the sequence as set forth in SEQ ID NO: 247. In some aspects, the ASO comprises the sequence as set forth in SEQ ID NO: 248. In some aspects, the ASO comprises the sequence as set forth in SEQ ID NO: 249. In some aspects, the ASO comprises the sequence as set forth in SEQ ID NO: 250. In some aspects, the ASO comprises the sequence as set forth in SEQ ID NO: 251. In some aspects, the ASO comprises the sequence as set forth in SEQ ID NO: 252. In some aspects, the ASO comprises the sequence as set forth in SEQ ID NO: 253. In some aspects, the ASO comprises the sequence as set forth in SEQ ID NO: 254. In some aspects, the ASO comprises the sequence as set forth in SEQ ID NO: 255. In some aspects, the ASO comprises the sequence as set forth in SEQ ID NO: 256. In some aspects, the ASO comprises the sequence as set forth in SEQ ID NO: 257. In some aspects, the ASO comprises the sequence as set forth in SEQ ID NO: 258. In some aspects, the ASO comprises the sequence as set forth in SEQ ID NO: 259. In some aspects, the ASO comprises the sequence as set forth in SEQ ID NO: 260. In some aspects, the ASO comprises the sequence as set forth in SEQ ID NO: 261. In some aspects, the ASO comprises the sequence as set forth in SEQ ID NO: 262. In some aspects, the ASO comprises the sequence as set forth in SEQ ID NO: 263. In some aspects, the ASO comprises the sequence as set forth in SEQ ID NO: 264. In some aspects, the ASO comprises the sequence as set forth in SEQ ID NO: 265. In some aspects, the ASO comprises the sequence as set forth in SEQ ID NO: 266. In some aspects, the ASO comprises the sequence as set forth in SEQ ID NO: 267. In some aspects, the ASO comprises the sequence as set forth in SEQ ID NO: 268. In some aspects, the ASO comprises the sequence as set forth in SEQ ID NO: 269. In some aspects, the ASO comprises the sequence as set forth in SEQ ID NO: 270.

[0540] In some aspects the ASO comprises or consists of a sequence at least about 60%, at least about 65%, at least about 70%, at least about 75%, at least about 80%, at least about 85%, at least about 90%, at least about 95%, at least about 96%, at least about 97%, at least about 98%, at least about 99%, or about 100% identical to a sequence set forth in SEQ ID NOs: 62-95 and 201-270. In some aspects the ASO (or contiguous nucleotide portion thereof) is selected from, or comprises, one of the sequences selected from the group consisting of SEQ ID NOs: 62-95 and 201-270 or a region of at least 8, 9, 10, 11, 12, 13, 14, 15, 16, 17, 18, 19, or 20 contiguous nucleotides thereof. In some aspects the ASO (or contiguous nucleotide portion thereof) is selected from, or comprises, one of the sequences selected from the group consisting of SEQ ID NOs: 62-95 and 201-270 or a region of at least 8, 9, 10, 11, 12, 13, 14, 15, 16, 17, 18, 19, or 20 contiguous nucleotides thereof, wherein the ASO (or contiguous nucleotide portion thereof) can optionally comprise one, two, three, or four mismatches when compared to the corresponding PMP22 transcript. In some aspects the ASO (or contiguous nucleotide portion thereof) is selected from, or comprises, one of the sequences selected from the group consisting of SEQ ID NOs: 62-95 and 201-270 except for 1, 2, 3, 4, 5, 6, 7, 8, 9 or 10 substitutions, wherein the substituted ASO can bind to the PMP22 transcript. In some aspects the ASO (or contiguous nucleotide portion thereof) is selected from, or comprises, one of the sequences selected from the group consisting of SEQ ID NOs: 62-95 and 201-270 or a region of at least 8, 9, 10, 11, 12, 13, 14, 15, 16, 17, 18, 19, or 20 contiguous nucleotides thereof, wherein the ASO (or contiguous nucleotide portion thereof) can optionally comprise one, two, three, or four additional 5′ and/or 3′ nucleotides complementary to the corresponding PMP22 transcript.

[0541] In some aspects, binding of an ASO targeting a PMP22 transcript disclosed herein to a mRNA transcript encoding PMP22 can reduce expression levels and/or activity levels of PMP22.

[0542] II.D. EVs, e.g., Exosomes

[0543] The EVs (e.g., exosomes) of the present disclosure can have a diameter between about 20 and about 300 nm. In certain aspects, an EV (e.g., exosome) of the present disclosure has a diameter between about 20-290 nm, 20-280 nm, 20-270 nm, 20-260 nm, 20-250 nm, 20-240 nm, 20-230 nm, 20-220 nm, 20-210 nm, 20-200 nm, 20-190 nm, 20-180 nm, 20-170 nm, 20-160 nm, 20-150 nm, 20-140 nm, 20-130 nm, 20-120 nm, 20-110 nm, 20-100 nm, 20-90 nm, 20-80 nm, 20-70 nm, 20-60 nm, 20-50 nm, 20-40 nm, 20-30 nm, 30-300 nm, 30-290 nm, 30-280 nm, 30-270 nm, 30-260 nm, 30-250 nm, 30-240 nm, 30-230 nm, 30-220 nm, 30-210 nm, 30-200 nm, 30-190 nm, 30-180 nm, 30-170 nm, 30-160 nm, 30-150 nm, 30-140 nm, 30-130 nm, 30-120 nm, 30-110 nm, 30-100 nm, 30-90 nm, 30-80 nm, 30-70 nm, 30-60 nm, 30-50 nm, 30-40 nm, 40-300 nm, 40-290 nm, 40-280 nm, 40-270 nm, 40-260 nm, 40-250 nm, 40-240 nm, 40-230 nm, 40-220 nm, 40-210 nm, 40-200 nm, 40-190 nm, 40-180 nm, 40-170 nm, 40-160 nm, 40-150 nm, 40-140 nm, 40-130 nm, 40-120 nm, 40-110 nm, 40-100 nm, 40-90 nm, 40-80 nm, 40-70 nm, 40-60 nm, 40-50 nm, 50-300 nm, 50-290 nm, 50-280 nm, 50-270 nm, 50-260 nm, 50-250 nm, 50-240 nm, 50-230 nm, 50-220 nm, 50-210 nm, 50-200 nm, 50-190 nm, 50-180 nm, 50-170 nm, 50-160 nm, 50-150 nm, 50-140 nm, 50-130 nm, 50-120 nm, 50-110 nm, 50-100 nm, 50-90 nm, 50-80 nm, 50-70 nm, 50-60 nm, 60-300 nm, 60-290 nm, 60-280 nm, 60-270 nm, 60-260 nm, 60-250 nm, 60-240 nm, 60-230 nm, 60-220 nm, 60-210 nm, 60-200 nm, 60-190 nm, 60-180 nm, 60-170 nm, 60-160 nm, 60-150 nm, 60-140 nm, 60-130 nm, 60-120 nm, 60-110 nm, 60-100 nm, 60-90 nm, 60-80 nm, 60-70 nm, 70-300 nm, 70-290 nm, 70-280 nm, 70-270 nm, 70-260 nm, 70-250 nm, 70-240 nm, 70-230 nm, 70-220 nm, 70-210 nm, 70-200 nm, 70-190 nm, 70-180 nm, 70-170 nm, 70-160 nm, 70-150 nm, 70-140 nm, 70-130 nm, 70-120 nm, 70-110 nm, 70-100 nm, 70-90 nm, 70-80 nm, 80-300 nm, 80-290 nm, 80-280 nm, 80-270 nm, 80-260 nm, 80-250 nm, 80-240 nm, 80-230 nm, 80-220 nm, 80-210 nm, 80-200 nm, 80-190 nm, 80-180 nm, 80-170 nm, 80-160 nm, 80-150 nm, 80-140 nm, 80-130 nm, 80-120 nm, 80-110 nm, 80-100 nm, 80-90 nm, 90-300 nm, 90-290 nm, 90-280 nm, 90-270 nm, 90-260 nm, 90-250 nm, 90-240 nm, 90-230 nm, 90-220 nm, 90-210 nm, 90-200 nm, 90-190 nm, 90-180 nm, 90-170 nm, 90-160 nm, 90-150 nm, 90-140 nm, 90-130 nm, 90-120 nm, 90-110 nm, 90-100 nm, 100-300 nm, 110-290 nm, 120-280 nm, 130-270 nm, 140-260 nm, 150-250 nm, 160-240 nm, 170-230 nm, 180-220 nm, or 190-210 nm. The size of the EV (e.g., exosome) described herein can be measured according to methods known in the art.

[0544] EVs (e.g., exosomes) of the present disclosure comprise a bi-lipid membrane (“exosome membrane” or “EV membrane”), comprising an interior surface (luminal surface) and an exterior surface. The interior surface faces the inner core of the EV (e.g., exosome), i.e., the lumen of the EV.

[0545] The EV or exosome membrane comprises lipids and fatty acids. Exemplary lipids comprise phospholipids, glycolipids, fatty acids, sphingolipids, phosphoglycerides, sterols, cholesterols, and phosphatidylserines. The EV or exosome membrane comprises an inner leaflet and an outer leaflet. The composition of the inner and outer leaflet can be determined by transbilayer distribution assays known in the art, see, e.g., Kuypers et al., Biohim Biophys Acta 1985 819:170.

[0546] In some aspects, the composition of the outer leaflet is between approximately 70-90% choline phospholipids, between approximately 0-15% acidic phospholipids, and between approximately 5-30% phosphatidylethanolamine. In some aspects, the composition of the inner leaflet is between approximately 15-40% choline phospholipids, between approximately 10-50% acidic phospholipids, and between approximately 30-60% phosphatidylethanolamine. In some aspects, the EV or exosome membrane comprises one or more polysaccharides, such as glycan. Glycans on the surface of the EV or exosomes can serve as an attachment to a maleimide moiety or a linker that connect the glycan and a maleimide moiety. The glycan can be present on one or more proteins on the surface of an EV (e.g., exosome), for example, a Scaffold X, such as a PTGFRN polypeptide, or on the lipid membrane of the EV (e.g., exosome). Glycans can be modified to have thiofucose that can serve as a functional group for attaching a maleimide moiety to the glycans. In some aspects, the Scaffold X can be modified to express a high number of glycan to allow additional attachments on the EV (e.g., exosome).

[0547] II.D.1. Scaffold Moieties

[0548] In some aspects, the biologically active molecule is attached to the surface or to the lumen of the EV (e.g., exosome) via a maleimide moiety. In some aspects, the biologically active molecule is attached to a scaffold moiety (e.g., Scaffold X) on the external surface or on the luminal surface of the EV (e.g., exosome) via a maleimide moiety.

[0549] In certain aspects, the one or more moieties are introduced into the EV (e.g., exosome) by transfection. In some aspects, the one or more moieties can be introduced into the EV (e.g., exosome) using synthetic macromolecules such as cationic lipids and polymers (Papapetrou et al., Gene Therapy 12: S118-S130 (2005)). In certain aspects, chemicals such as calcium phosphate, cyclodextrin, or polybrene, can be used to introduce the one or more moieties to the EV (e.g, exosome).

[0550] In some aspects, one or more scaffold moieties can be CD47, CD55, CD49, CD40, CD133, CD59, glypican-1, CD9, CD63, CD81, integrins, selectins, lectins, cadherins, other similar polypeptides known to those of skill in the art, or any combination thereof.

[0551] In other aspects, one or more scaffold moieties are expressed in the membrane of the EVs (e.g., exosomes) by recombinantly expressing the scaffold moieties in the producer cells. The EVs (e.g., exosomes) obtained from the producer cells can be further modified to be conjugated to a maleimide moiety or to a linker. In other aspects, the scaffold moiety, Scaffold X and/or Scaffold Y, is deglycosylated. In some aspects, the scaffold moiety, Scaffold X and/or Scaffold Y, is highly glycosylated, e.g., higher than naturally-occurring Scaffold X and/or Scaffold Y under the same condition.

[0552] II.D.1.a. Scaffold X

[0553] Various modifications or fragments of the scaffold moiety can be used for the aspects of the present disclosure. For example, scaffold moieties modified to have enhanced affinity to a binding agent can be used for generating surface-engineered EVs (e.g., exosomes) that can be purified using the binding agent. Scaffold moieties modified to be more effectively targeted to EVs (e.g., exosomes) and/or membranes can be used. Scaffold moieties modified to comprise a minimal fragment required for specific and effective targeting to EV (e.g., exosome) membranes can be also used. In some aspects, scaffold moieties can be linked to the maleimide moiety as described herein. In other aspects, scaffold moieties are not linked to the maleimide moiety.

[0554] Scaffold moieties can be engineered synthetically or recombinantly, e.g., to be expressed as a fusion protein, e.g., fusion protein of Scaffold X to another moiety. For example, the fusion protein can comprise a scaffold moiety disclosed herein (e.g., Scaffold X, e.g., PTGFRN, BSG, IGSF2, IGSF3, IGSF8, ITGB1, ITGA4, SLC3A2, ATP transporter, or a fragment or a variant thereof) linked to another moiety. In case of the fusion protein, the second moiety can be a natural peptide, a recombinant peptide, a synthetic peptide, or any combination thereof. In other aspects, the scaffold moieties can be CD9, CD63, CD81, PDGFR, GPI anchor proteins, lactadherin, LAMP2, or LAMP2B, or any combination thereof. Non-limiting examples of other scaffold moieties that can be used with the present disclosure include: aminopeptidase N (CD13); Neprilysin, AKA membrane metalloendopeptidase (MME); ectonucleotide pyrophosphatase/phosphodiesterase family member 1 (ENPP1); Neuropilin-1 (NRP1); or any combination thereof.

[0555] In some aspects, the surface (e.g., Scaffold X)-engineered EVs (e.g., exosomes) described herein demonstrate superior characteristics compared to EVs (e.g., exosomes) known in the art. For example, surface (e.g., Scaffold X)-engineered contain modified proteins more highly enriched on their external surface or luminal surface of the EV (e.g., exosome) than naturally occurring EVs (e.g., exosomes) or the EVs (e.g., exosomes) produced using conventional EV (e.g., exosome) proteins. Moreover, the surface (e.g., Scaffold X)-engineered EVs (e.g., exosomes) of the present disclosure can have greater, more specific, or more controlled biological activity compared to naturally occurring EVs (e.g., exosomes) or the EVs (e.g., exosomes) produced using conventional EV (e.g., exosome) proteins.

[0556] In some aspects, the Scaffold X comprises Prostaglandin F2 receptor negative regulator (the PTGFRN polypeptide). The PTGFRN polypeptide can be also referred to as CD9 partner 1 (CD9P-1), Glu-Trp-Ile EWI motif-containing protein F (EWI-F), Prostaglandin F2-alpha receptor regulatory protein, Prostaglandin F2-alpha receptor-associated protein, or CD315. The full-length amino acid sequence of the human PTGFRN polypeptide (Uniprot Accession No. Q9P2B2) is shown below.

PTGFRN polypeptide
(SEQ ID NO: 301)
MGRLASRPLLLALLSLALCRGRVVRVPTATLVRVV
GTELVIPCNVSDYDGPSEQNFDWSFSSLGSSFVEL
ASTWEVGFPAQLYQERLQRGEILLRRTANDAVELH
IKNVQPSDQGHYKCSTPSTDATVQGNYEDTVQVKV
LADSLHVGPSARPPPSLSLREGEPFELRCTAASAS
PLHTHLALLWEVHRGPARRSVLALTHEGRFHPGLG
YEQRYHSGDVRLDTVGSDAYRLSVSRALSADQGSY
RCIVSEWIAEQGNWQEIQEKAVEVATVVIQPSVLR
AAVPKNVSVAEGKELDLTCNITTDRADDVRPEVTW
SFSRMPDSTLPGSRVLARLDRDSLVHSSPHVALSH
VDARSYHLLVRDVSKENSGYYYCHVSLWAPGHNRS
WHKVAEAVSSPAGVGVTWLEPDYQVYLNASKVPGF
ADDPTELACRVVDTKSGEANVRFTVSWYYRMNRRS
DNVVTSELLAVMDGDWTLKYGERSKQRAQDGDFIF
SKEHTDTFNFRIQRTTEEDRGNYYCVVSAWTKQRN
NSWVKSKDVFSKPVNIFWALEDSVLVVKARQPKPF
FAAGNTFEMTCKVSSKNIKSPRYSVLIMAEKPVGD
LSSPNETKYIISLDQDSVVKLENWTDASRVDGVVL
EKVQEDEFRYRMYQTQVSD
AGLYRCMVTAWSPVRGSLWREAATSLSNPIEIDFQ
TSGPIFNASVHSDTPSVIRGDLIKLFCIITVEGAA
LDPDDMAFDVSWFAVHSFGLDKAPVLLSSLDRKGI
VTTSRRDWKSDLSLERVSVLEFLLQVHGSEDQDFG
NYYCSVTPWVKSPTGSWQKEAEIHSKPVFITVKMD
VLNAFKYPLLIGVGLSTVIGLLSCLIGYCSSHWCC
KKEVQETRRERRRLMSMEMD

[0557] The PTGFRN polypeptide contains a signal peptide (amino acids 1 to 25 of SEQ ID NO: 301), the extracellular domain (amino acids 26 to 832 of SEQ ID NO: 301), a transmembrane domain (amino acids 833 to 853 of SEQ ID NO: 301), and a cytoplasmic domain (amino acids 854 to 879 of SEQ ID NO: 301). The mature PTGFRN polypeptide consists of SEQ ID NO: 301 without the signal peptide, i.e., amino acids 26 to 879 of SEQ ID NO: 301. In some aspects, a PTGFRN polypeptide fragment useful for the present disclosure comprises a transmembrane domain of the PTGFRN polypeptide. In other aspects, a PTGFRN polypeptide fragment useful for the present disclosure comprises the transmembrane domain of the PTGFRN polypeptide and (i) at least five, at least 10, at least 15, at least 20, at least 25, at least 30, at least 40, at least 50, at least 70, at least 80, at least 90, at least 100, at least 110, at least 120, at least 130, at least 140, at least 150 amino acids at the N terminus of the transmembrane domain, (ii) at least five, at least 10, at least 15, at least 20, or at least 25 amino acids at the C terminus of the transmembrane domain, or both (i) and (ii).

[0558] In some aspects, the fragments of PTGFRN polypeptide lack one or more functional or structural domains, such as IgV.

[0559] In other aspects, the Scaffold X comprises an amino acid sequence at least about 70%, at least about 75%, at least about 80%, at least about 85%, at least about 90%, at least about 95%, at least about 96%, at least about 97%, at least about 98%, at least about 99%, or about 100% identical to amino acids 26 to 879 of SEQ ID NO: 301. In other aspects, the Scaffold X comprises an amino acid sequence at least about at least about 70%, at least about 75%, at least about 80%, at least about 85%, at least about 90%, at least about 95%, at least about 96%, at least about 97%, at least about 98%, at least about 99%, or about 100% identical to SEQ ID NO: 302, a fragment of the PTGFRN polypeptide. In other aspects, the Scaffold X comprises the amino acid sequence of SEQ ID NO: 302, except one amino acid mutation, two amino acid mutations, three amino acid mutations, four amino acid mutations, five amino acid mutations, six amino acid mutations, or seven amino acid mutations. The mutations can be a substitution, an insertion, a deletion, or any combination thereof. In some aspects, the Scaffold X comprises the amino acid sequence of SEQ ID NO: 302 and 1 amino acid, two amino acids, three amino acids, four amino acids, five amino acids, six amino acids, seven amino acids, eight amino acids, nine amino acids, ten amino acids, 11 amino acids, 12 amino acids, 13 amino acids, 14 amino acids, 15 amino acids, 16 amino acids, 17 amino acids, 18 amino acids, 19 amino acids, or 20 amino acids or longer at the N terminus and/or C terminus of SEQ ID NO: 302.

[0560] In other aspects, the Scaffold X comprises an amino acid sequence at least about at least about 70%, at least about 75%, at least about 80%, at least about 85%, at least about 90%, at least about 95%, at least about 96%, at least about 97%, at least about 98%, at least about 99%, or about 100% identical to amino acids 26 to 879 of SEQ ID NO: 301, amino acids 833 to 853 of SEQ ID NO: 301, SEQ ID NO: 302, or SEQ ID NO: 301. In other aspects, the Scaffold X comprises the amino acid sequence of amino acids 26 to 879 of SEQ ID NO: 301, amino acids 833 to 853 of SEQ ID NO: 301, SEQ ID NO: 302, or SEQ ID NO: 301, except one amino acid mutation, two amino acid mutations, three amino acid mutations, four amino acid mutations, five amino acid mutations, six amino acid mutations, or seven amino acid mutations. The mutations can be a substitution, an insertion, a deletion, or any combination thereof. In some aspects, the Scaffold X comprises the amino acid sequence of amino acids 26 to 879 of SEQ ID NO: 301, amino acids 833 to 853 of SEQ ID NO: 301, SEQ ID NO: 302, or SEQ ID NO: 301, and 1 amino acid, two amino acids, three amino acids, four amino acids, five amino acids, six amino acids, seven amino acids, eight amino acids, nine amino acids, ten amino acids, 11 amino acids, 12 amino acids, 13 amino acids, 14 amino acids, 15 amino acids, 16 amino acids, 17 amino acids, 18 amino acids, 19 amino acids, or 20 amino acids or longer at the N terminus and/or C terminus of amino acids 26 to 879 of SEQ ID NO: 1, amino acids 833 to 853 of SEQ ID NO: 301, SEQ ID NO: 302, or SEQ ID NO: 301.

[0561] In some aspects, the Scaffold X comprises, consists, or consists essentially of the amino sequence set forth in SEQ ID NOS: 301 (PTGFRN protein), 302 (amino acids 687-878 of full length PTGFRN), 303 (BSG protein), 304 (IGSF8 protein), 305 (ITGB1 protein), 306 (ITGA4 protein), 307 (SLC3A2 protein), or a functional fragment thereof.

[0562] In other aspects, the Scaffold X comprises the BSG protein, the IGSF8 protein, the IGSF3 protein, the ITGB1 protein, the SLC3A2 protein, the ITGA4 protein, the ATP1A1 protein, the ATP1A2 protein, the ATP1A3 protein, the ATP1A4 protein, the ATP1A5 protein, the ATP2B1 protein, the ATP2B2 protein, the ATP2B3 protein, the ATP2B4 protein, or the IGSF2 protein, wherein the Scaffold X comprises an amino acid sequence at least about 70%, at least about 75%, at least about 80%, at least about 85%, at least about 90%, at least about 95%, at least about 96%, at least about 97%, at least about 98%, at least about 99%, or about 100% identical to the corresponding mature BSG protein, IGSF8 protein, IGSF3 protein, ITGB1 protein, SLC3A2 protein, ITGA4 protein, ATP1A1 protein, ATP1A2 protein, ATP1A3 protein, ATP1A4 protein, ATP1A5 protein, ATP2B1 protein, ATP2B2 protein, ATP2B3 protein, ATP2B4 protein, or IGSF2 protein (without the signal peptide). In some aspects, the BSG protein, the IGSF8 protein, the IGSF3 protein, the ITGB1 protein, the SLC3A2 protein, the ITGA4 protein, the ATP1A1 protein, the ATP1A2 protein, the ATP1A3 protein, the ATP1A4 protein, the ATP1A5 protein, the ATP2B1 protein, the ATP2B2 protein, the ATP2B3 protein, the ATP2B4 protein, or the IGSF2 protein lacks one or more functional or structural domains, such as IgV.

[0563] Non-limiting examples of other Scaffold X proteins can be found at U.S. Pat. No. 10,195,290B1, issued Feb. 5, 2019, which is incorporated by reference in its entirety, the ATP transporter proteins: ATP1A1, ATP1A2, ATP1A3, ATP1A4, ATP1B3, ATP2B1, ATP2B2, and ATP2B4), CD9, CD63, CD81, PDGFR, GPI anchor proteins, lactadherin, LAMP2, and LAMP2B.

[0564] In some aspects, a Scaffold X comprises Basigin (the BSG protein; SEQ ID NO: 303). The BSG protein is also known as 5F7, Collagenase stimulatory factor, Extracellular matrix metalloproteinase inducer (EMMPRIN), Leukocyte activation antigen M6, OK blood group antigen, Tumor cell-derived collagenase stimulatory factor (TCSF), or CD147. The Uniprot number for the human BSG protein is P35613. The signal peptide of the BSG protein is amino acid 1 to 21. Amino acids 138-323 are the extracellular domain, amino acids 324 to 344 are the transmembrane domain, and amino acids 345 to 385 are the cytoplasmic domain.

[0565] In other aspects, the Scaffold X comprises an amino acid sequence at least about 70%, at least about 75%, at least about 80%, at least about 85%, at least about 90%, at least about 95%, at least about 96%, at least about 97%, at least about 98%, at least about 99%, or about 100% identical to amino acids 22 to 385 of human BSG protein. In some aspects, the fragments of Basigin polypeptide lack one or more functional or structural domains, such as IgV, e.g., amino acids 221 to 315 of human BSG protein.

[0566] In some aspects, a Scaffold X comprises Immunoglobulin superfamily member 8 (IgSF8 or the IGSF8 protein; SEQ ID NO: 304), which is also known as CD81 partner 3, Glu-Trp-Ile EWI motif-containing protein 2 (EWI-2), Keratinocytes-associated transmembrane protein 4 (KCT-4), LIR-D1, Prostaglandin regulatory-like protein (PGRL) or CD316. The full length human IGSF8 protein is accession no. Q969P0 in Uniprot. The human IGSF8 protein has a signal peptide (amino acids 1 to 27 of human IGSF8 protein), an extracellular domain (amino acids 28 to 579 of human IGSF8 protein), a transmembrane domain (amino acids 580 to 600 of human IGSF8 protein), and a cytoplasmic domain (amino acids 601 to 613 of human IGSF8 protein).

[0567] In other aspects, the Scaffold X comprises an amino acid sequence at least about 70%, at least about 75%, at least about 80%, at least about 85%, at least about 90%, at least about 95%, at least about 96%, at least about 97%, at least about 98%, at least about 99%, or about 100% identical to amino acids 28 to 613 of human IGSF8 protein. In some aspects, the IGSF8 protein lack one or more functional or structural domains, such as IgV. In other aspects, the Scaffold X comprises the amino acid sequence of human IGSF8 protein, except one amino acid mutation, two amino acid mutations, three amino acid mutations, four amino acid mutations, five amino acid mutations, six amino acid mutations, or seven amino acid mutations. The mutations can be a substitution, an insertion, a deletion, or any combination thereof. In some aspects, the Scaffold X comprises the amino acid sequence of human IGSF8 protein and 1 amino acid, two amino acids, three amino acids, four amino acids, five amino acids, six amino acids, seven amino acids, eight amino acids, nine amino acids, ten amino acids, 11 amino acids, 12 amino acids, 13 amino acids, 14 amino acids, 15 amino acids, 16 amino acids, 17 amino acids, 18 amino acids, 19 amino acids, or 20 amino acids or longer at the N terminus and/or C terminus of human IGSF8 protein.

[0568] In some aspects, a Scaffold X for the present disclosure comprises Immunoglobulin superfamily member 3 (IgSF3 or the IGSF3 protein; SEQ ID NO: 309), which is also known as Glu-Trp-Ile EWI motif-containing protein 3 (EWI-3). The human IGSF3 protein has a signal peptide (amino acids 1 to 19 of the IGSF3 protein), an extracellular domain (amino acids 20 to 1124 of the IGSF3 protein), a transmembrane domain (amino acids 1125 to 1145 of the IGSF3 protein), and a cytoplasmic domain (amino acids 1146 to 1194 of the IGSF3 protein).

[0569] In other aspects, the Scaffold X comprises an amino acid sequence at least about 70%, at least about 75%, at least about 80%, at least about 85%, at least about 90%, at least about 95%, at least about 96%, at least about 97%, at least about 98%, at least about 99%, or about 100% identical to amino acids 28 to 613 of the IGSF3 protein. In some aspects, the IGSF3 protein lack one or more functional or structural domains, such as IgV.

[0570] In some aspects, a Scaffold X for the present disclosure comprises Integrin beta-1 (the ITGB1 protein; SEQ ID NO: 305), which is also known as Fibronectin receptor subunit beta, Glycoprotein IIa (GPIIA), VLA-4 subunit beta, or CD29. The human ITGB1 protein has a signal peptide (amino acids 1 to 20 of the human ITGB1 protein), an extracellular domain (amino acids 21 to 728 of the human ITGB1 protein), a transmembrane domain (amino acids 729 to 751 of the human ITGB1 protein), and a cytoplasmic domain (amino acids 752 to 798 of the human ITGB1 protein).

[0571] In other aspects, the Scaffold X comprises an amino acid sequence at least about 70%, at least about 75%, at least about 80%, at least about 85%, at least about 90%, at least about 95%, at least about 96%, at least about 97%, at least about 98%, at least about 99%, or about 100% identical to amino acids 21 to 798 of the human ITGB1 protein. In some aspects, the ITGB1 protein lack one or more functional or structural domains, such as IgV.

[0572] In other aspects, the Scaffold X comprises the ITGA4 protein (SEQ ID NO: 306), which comprises an amino acid sequence at least about 70%, at least about 75%, at least about 80%, at least about 85%, at least about 90%, at least about 95%, at least about 96%, at least about 97%, at least about 98%, at least about 99%, or about 100% identical to the human ITGB1 protein without the signal peptide (amino acids 1 to 33 of the human ITGB1 protein). In some aspects, the ITGA4 protein lacks one or more functional or structural domains, such as IgV.

[0573] In other aspects, the Scaffold X comprises the SLC3A2 protein (SEQ ID NO: 307), which comprises an amino acid sequence at least about 70%, at least about 75%, at least about 80%, at least about 85%, at least about 90%, at least about 95%, at least about 96%, at least about 97%, at least about 98%, at least about 99%, or about 100% identical to the SLC3A2 protein without the signal peptide. In some aspects, the SLC3A2 protein lacks one or more functional or structural domains, such as IgV.

[0574] In other aspects, the Scaffold X comprises the ATP1A1 protein (SEQ ID NO: 310), which comprises an amino acid sequence at least about 70%, at least about 75%, at least about 80%, at least about 85%, at least about 90%, at least about 95%, at least about 96%, at least about 97%, at least about 98%, at least about 99%, or about 100% identical to the ATP1A1 protein without the signal peptide. In some aspects, the ATP1A1 protein lacks one or more functional or structural domains, such as IgV.

[0575] In other aspects, the Scaffold X comprises the ATP1A2 protein (SEQ ID NO: 311), which comprises an amino acid sequence at least about 70%, at least about 75%, at least about 80%, at least about 85%, at least about 90%, at least about 95%, at least about 96%, at least about 97%, at least about 98%, at least about 99%, or about 100% identical to the ATP1A2 protein without the signal peptide. In some aspects, the ATP1A2 protein lacks one or more functional or structural domains, such as IgV.

[0576] In other aspects, the Scaffold X comprises the ATP1A3 protein (SEQ ID NO: 312), which comprises an amino acid sequence at least about 70%, at least about 75%, at least about 80%, at least about 85%, at least about 90%, at least about 95%, at least about 96%, at least about 97%, at least about 98%, at least about 99%, or about 100% identical to the ATP1A3 protein without the signal peptide. In some aspects, the ATP1A3 protein lacks one or more functional or structural domains, such as IgV.

[0577] In other aspects, the Scaffold X comprises the ATP1A4 protein (SEQ ID NO: 313), which comprises an amino acid sequence at least about 70%, at least about 75%, at least about 80%, at least about 85%, at least about 90%, at least about 95%, at least about 96%, at least about 97%, at least about 98%, at least about 99%, or about 100% identical to the ATP1A4 protein without the signal peptide. In some aspects, the ATP1A4 protein lacks one or more functional or structural domains, such as IgV.

[0578] In other aspects, the Scaffold X comprises the ATP1B3 protein (SEQ ID NO: 314), which comprises an amino acid sequence at least about 70%, at least about 75%, at least about 80%, at least about 85%, at least about 90%, at least about 95%, at least about 96%, at least about 97%, at least about 98%, at least about 99%, or about 100% identical to the ATP1A5 protein without the signal peptide. In some aspects, the ATP1A5 protein lacks one or more functional or structural domains, such as IgV.

[0579] In other aspects, the Scaffold X comprises the ATP2B1 protein (SEQ ID NO: 315), which comprises an amino acid sequence at least about 70%, at least about 75%, at least about 80%, at least about 85%, at least about 90%, at least about 95%, at least about 96%, at least about 97%, at least about 98%, at least about 99%, or about 100% identical to the ATP2B1 protein without the signal peptide. In some aspects, the ATP2B1 protein lacks one or more functional or structural domains, such as IgV.

[0580] In other aspects, the Scaffold X comprises the ATP2B2 protein (SEQ ID NO: 316), which comprises an amino acid sequence at least about 70%, at least about 75%, at least about 80%, at least about 85%, at least about 90%, at least about 95%, at least about 96%, at least about 97%, at least about 98%, at least about 99%, or about 100% identical to the ATP2B2 protein without the signal peptide. In some aspects, the ATP2B2 protein lacks one or more functional or structural domains, such as IgV.

[0581] In other aspects, the Scaffold X comprises the ATP2B3 protein (SEQ ID NO: 317), which comprises an amino acid sequence at least about 70%, at least about 75%, at least about 80%, at least about 85%, at least about 90%, at least about 95%, at least about 96%, at least about 97%, at least about 98%, at least about 99%, or about 100% identical to the ATP2B3 protein without the signal peptide. In some aspects, the ATP2B3 protein lacks one or more functional or structural domains, such as IgV.

[0582] In other aspects, the Scaffold X comprises the ATP2B4 protein (SEQ ID NO: 318), which comprises an amino acid sequence at least about 70%, at least about 75%, at least about 80%, at least about 85%, at least about 90%, at least about 95%, at least about 96%, at least about 97%, at least about 98%, at least about 99%, or about 100% identical to the ATP2B4 protein without the signal peptide. In some aspects, the ATP2B4 protein lacks one or more functional or structural domains, such as IgV.

[0583] In other aspects, the Scaffold X comprises the IGSF2 protein (SEQ ID NO: 308), which comprises an amino acid sequence at least about 70%, at least about 75%, at least about 80%, at least about 85%, at least about 90%, at least about 95%, at least about 96%, at least about 97%, at least about 98%, at least about 99%, or about 100% identical to the IGSF2 protein without the signal peptide. In some aspects, the IGSF2 protein lacks one or more functional or structural domains, such as IgV.

[0584] Non-limiting examples of other Scaffold X proteins can be found at U.S. Pat. No. 10,195,290B1, issued Feb. 5, 2019, which is incorporated by reference in its entirety.

[0585] In some aspects, the sequence encodes a fragment of the scaffold moiety lacking at least 5, 10, 50, 100, 200, 300, 400, 500, 600, 700, or 800 amino acids from the N-terminus of the native protein. In some aspects, the sequence encodes a fragment of the scaffold moiety lacking at least 5, 10, 50, 100, 200, 300, 400, 500, 600, 700, or 800 amino acids from the C-terminus of the native protein. In some aspects, the sequence encodes a fragment of the scaffold moiety lacking at least 5, 10, 50, 100, 200, 300, 400, 500, 600, 700, or 800 amino acids from both the N-terminus and C-terminus of the native protein. In some aspects, the sequence encodes a fragment of the scaffold moiety lacking one or more functional or structural domains of the native protein.

[0586] In some aspects, the scaffold moieties, e.g., Scaffold X, e.g., a PTGFRN protein, are linked to one or more heterologous proteins. The one or more heterologous proteins can be linked to the N-terminus of the scaffold moieties. The one or more heterologous proteins can be linked to the C-terminus of the scaffold moieties. In some aspects, the one or more heterologous proteins are linked to both the N-terminus and the C-terminus of the scaffold moieties. In some aspects, the heterologous protein is a mammalian protein. In some aspects, the heterologous protein is a human protein.

[0587] In some aspects, Scaffold X can be used to link any moiety to the luminal surface and the external surface of the EV (e.g., exosome) at the same time. For example, the PTGFRN polypeptide can be used to link one or more biologically active molecules indirectly through a maleimide moiety or directly to a maleimide moiety or a linker to the luminal surface in addition to the external surface of the EV (e.g., exosome). Therefore, in certain aspects, Scaffold X can be used for dual purposes.

[0588] In other aspects, the EVs (e.g., exosomes) of the present disclosure comprises a higher number of Scaffold X proteins compared to the naturally-occurring EVs (e.g., exosomes). In some aspects, the EVs (e.g., exosomes) of the disclosure comprise at least about 5 fold, at least about 10 fold, at least about 20 fold, at least about 30 fold, at least about 40 fold, at least about 50 fold, at least about 60 fold, at least about 70 fold, at least about 80 fold, at least about 90 fold, at least about 100 fold, at least about 110 fold, at least about 120 fold, at least about 130 fold, at least about 140 fold, at least about 150 fold, at least about 160 fold, at least about 170 fold, at least about 180 fold, at least about 190 fold, at least about 200 fold, at least about 210 fold, at least about 220 fold, at least about 230 fold, at least about 240 fold, at least about 250 fold, at least about 260 fold, at least about 270 fold higher number of Scaffold X (e.g., a PTGFRN polypeptide) compared to the naturally-occurring EV (e.g., exosome). The number of Scaffold X, e.g., PTGFRN polypeptide, on the EV (e.g., exosome) of the present disclosure is at least about 100, at least about 200, at least about 300, at least about 400, at least about 500, at least about 600, at least about 700, at least about 800, at least about 900, at least about 1000, at least about 1100, at least about 1200, at least about 1300, at least about 1400, at least about 1500, at least about 1600, at least about 1700, at least about 1800, at least about 1900, at least about 2000, at least about 2100, at least about 2200, at least about 2300, at least about 2400, at least about 2500, at least about 2600, at least about 2700, at least about 2800, at least about 2900, at least about 3000, at least about 4000, at least about 5000, at least about 6000, at least about 7000, at least about 8000, at least about 9000, or at least about 10000. In some aspects, the number of Scaffold X, e.g., PTGFRN polypeptide, on the EV (e.g., exosome) of the present disclosure is from about 100 to about 100,000, from about 200 to about 9000, from about 300 to about 9000, from about 400 to about 9000, from about 500 to about 9000, from about 600 to about 8000, from about 800 to about 8000, from about 900 to about 8000, from about 1000 to about 8000, from about 1100 to about 8000, from about 1200 to about 8000, from about 1300 to about 8000, from about 1400 to about 8000, from about 1500 to about 8000, from about 1600 to about 8000, from about 1700 to about 8000, from about 1800 to about 8000, from about 1900 to about 8000, from about 2000 to about 8000, from about 2100 to about 8000, from about 2200 to about 8000, from about 2300 to about 8000, from about 2400 to about 8000, from about 2500 to about 8000, from about 2600, from about 2700 to about 8000, from about 2800 to about 8000, from about 2900 to about 8000, from about 3000 to about 8000, from about 4000 to about 8000, from about 5000 to about 8000, from about 6000 to about 8000, from about 7000 to about 8000, from about 8000, from 7000 to about 9000, or from about 6000 to about 10000. In some aspects, the number of Scaffold X, e.g., PTGFRN polypeptide, on the EV (e.g., exosome) of the present disclosure is from about 5000 to about 8000, e.g., about 5000, about 6000, about 7000, or about 8000. In some aspects, the number of Scaffold X, e.g., PTGFRN polypeptide, on the EV (e.g., exosome) of the present disclosure is from about 6000 to about 8000, e.g., about 6000, about 7000, or about 8000. In some aspects, the number of Scaffold X, e.g., PTGFRN polypeptide, on the EV (e.g., exosome) of the present disclosure is from about 4000 to about 9000, e.g., about 4000, about 5000, about 6000, about 7000, about 8000, about 9000.

[0589] In some aspects, the Scaffold X is or comprises a PTGFRN protein fragment of SEQ ID NO: 319, 320, 321, 322, 323, or 324; a BSG protein fragment of SEQ ID NO: 326, 327, or 328; or a IGSF8 protein fragment of SEQ ID NO: 330, 331, 332, or 333. In some aspects, the Scaffold X is or comprises a PTGFRN protein without its signal peptide, i.e., a PTGFRN protein or a fragment thereof without its 21 N-terminal amino acids (MGRLASRPLLLALLSLALCRG; SEQ ID NO: 325). In some aspects, the Scaffold X is or comprises a BSG protein without its signal peptide, i.e., a BSG protein or a fragment thereof without its 18 N-terminal amino acids (MAAALFVLLGFALLGTHG; SEQ ID NO: 329). In some aspects, the Scaffold X is or comprises an IGSF8 protein without its signal peptide, i.e., a IGSF8 protein or a fragment thereof without its 27 N-terminal amino acids (MGALRPTLLPPSLPLLLLLMLGMGCWA; SEQ ID NO: 334).

[0590] Scaffold X proteins and fragments thereof are disclosed in the sequence listing.

[0591] II.D.1.b. Scaffold Y

[0592] In some aspects, EVs (e.g., exosomes) of the present disclosure comprise an internal space (i.e., lumen) that is different from that of the naturally occurring EVs (e.g., exosomes). For example, the EV (e.g., exosome) can be changed such that the composition on the luminal surface of the EV (e.g., exosome) has the protein, lipid, or glycan content different from that of the naturally-occurring EVs (e.g., exosomes).

[0593] In some aspects, engineered EVs (e.g., exosomes) can be produced from a cell transformed with an exogenous sequence encoding a scaffold moiety (e.g., exosome proteins, e.g., Scaffold Y) or a modification or a fragment of the scaffold moiety that changes the composition or content of the luminal surface of the exosome. Various modifications or fragments of the EV (e.g., exosome) protein that can be expressed on the luminal surface of the EV (e.g, exosome) can be used for the aspects of the present disclosure.

[0594] In some aspects, the EV (e.g, exosome) proteins that can change the luminal surface of the EV (e.g, exosome) include, but are not limited to the MARCKS protein, MARCKSL1 protein, BASP1 protein, or any combination thereof. In some aspects, the Scaffold Y comprises Brain Acid Soluble Protein 1 (the BASP1 protein). The BASP1 protein is also known as 22 kDa neuronal tissue-enriched acidic protein or neuronal axonal membrane protein NAP-22. The full-length human BASP1 protein sequence (isomer 1) is shown below. An isomer produced by an alternative splicing is missing amino acids 88 to 141 from the BASP1 protein of SEQ ID NO: 403.

The BASP1 protein
(SEQ ID NO: 403)
MGGKLSKKKKGYNVNDEKAKEKDKKAEGAATEEEG
TPKESEPQAAAEPAEAKEGKEKPDQDAEGKAEEKE
GEKDAAAAKEEAPKAEPEKTEGAAEAKAEPPKAPE
QEQAAPGPAAGGEAPKAAEAAAAPAESAAPAAGEE
PSKEEGEPKKTEAPAAPAAQETKSDGAPASDSKPG
SSEAAPSSKETPAATEAPSSTPKAQGPAASAEEPK
PVEAPAANSDQTVTVKE

[0595] The mature BASP1 protein sequence is missing the first Met from SEQ ID NO: 403 and thus contains amino acids 2 to 227 of SEQ ID NO: 403.

[0596] In some aspects, Scaffold Y useful for the present disclosure comprises an amino acid sequence at least about 70%, at least about 75%, at least about 80%, at least about 85%, at least about 90%, at least about 95%, at least about 96%, at least about 97%, at least about 98%, at least about 99%, or about 100% identical to amino acids 2 to 227 of SEQ ID NO: 403. In some aspects, the Scaffold X comprises an amino acid sequence at least about at least about 70%, at least about 75%, at least about 80%, at least about 85%, at least about 90%, at least about 95%, at least about 96%, at least about 97%, at least about 98%, at least about 99%, or about 100% identical to SEQ ID NO: 403. In other aspects, a Scaffold Y useful for the present disclosure comprises the amino acid sequence of SEQ ID NO: 403, except one amino acid mutation, two amino acid mutations, three amino acid mutations, four amino acid mutations, five amino acid mutations, six amino acid mutations, or seven amino acid mutations. The mutations can be a substitution, an insertion, a deletion, or any combination thereof. In some aspects, a Scaffold Y useful for the present disclosure comprises the amino acid sequence of SEQ ID NO: 403 and 1 amino acid, two amino acids, three amino acids, four amino acids, five amino acids, six amino acids, seven amino acids, eight amino acids, nine amino acids, ten amino acids, 11 amino acids, 12 amino acids, 13 amino acids, 14 amino acids, 15 amino acids, 16 amino acids, 17 amino acids, 18 amino acids, 19 amino acids, or 20 amino acids or longer at the N terminus and/or C terminus of SEQ ID NO: 403.

[0597] In certain aspects, the protein sequence of any of SEQ ID NOs: 1-109 disclosed in PCT/US2018/061679 is sufficient to be a Scaffold Y for the present disclosure (e.g., scaffold moiety linked to a linker).

[0598] In certain aspects, a Scaffold Y useful for the present disclosure comprises a peptide with the MGXKLSKKK or GXKLSKKK, where X is alanine or any other amino acid (SEQ ID NO: 404). In some aspects, an EV (e.g., exosome) comprises a peptide with sequence of (M)(Gπ)(ξ)(Φ/π)(S/A/G/N)(+)(+) or (G)(π)(ξ)(Φ/π)(S/A/G/N)(+)(+), wherein each parenthetical position represents an amino acid, and wherein a is any amino acid selected from the group consisting of (Pro, Gly, Ala, Ser), 4 is any amino acid selected from the group consisting of (Asn, Gln, Ser, Thr, Asp, Glu, Lys, His, Arg), 4 is any amino acid selected from the group consisting of (Val, Ile, Leu, Phe, Trp, Tyr, Met), and (+) is any amino acid selected from the group consisting of (Lys, Arg, His); and wherein position five is not (+) and position six is neither (+) nor (Asp or Glu). In further aspects, an EV (e.g., exosome) described herein (e.g., engineered exosome) comprises a peptide with sequence of (M)(G)(π)(X)(Φ/π)(π)(+)(+) or (G)(π)(X)(Φ/π)(π)(+)(+), wherein each parenthetical position represents an amino acid, and wherein π is any amino acid selected from the group consisting of (Pro, Gly, Ala, Ser), X is any amino acid, Φ is any amino acid selected from the group consisting of (Val, Ile, Leu, Phe, Trp, Tyr, Met), and (+) is any amino acid selected from the group consisting of (Lys, Arg, His); and wherein position five is not (+) and position six is neither (+) nor (Asp or Glu). See Aasland et al., FEBS Letters 513 (2002) 141-144 for amino acid nomenclature.

[0599] In other aspects, the Scaffold Y comprises an amino acid sequence at least about at least about 70%, at least about 75%, at least about 80%, at least about 85%, at least about 90%, at least about 95%, at least about 96%, at least about 97%, at least about 98%, at least about 99%, or about 100% identical to any one of the sequences disclosed in U.S. Pat. No. 10,195,290B1, issued Feb. 5, 2019.

[0600] Scaffold Y-engineered exosomes described herein can be produced from a cell transformed with any sequence set forth in PCT/US2018/061679 (SEQ ID NO: 4-109).

[0601] In other aspects, the EVs (e.g., exosomes) of the present disclosure comprises a higher number of Scaffold Y proteins compared to the naturally-occurring EVs (e.g., exosomes). In some aspects, the EVs (e.g., exosomes) of the disclosure comprise at least about 5 fold, at least about 10 fold, at least about 20 fold, at least about 30 fold, at least about 40 fold, at least about 50 fold, at least about 60 fold, at least about 70 fold, at least about 80 fold, at least about 90 fold, at least about 100 fold, at least about 110 fold, at least about 120 fold, at least about 130 fold, at least about 140 fold, at least about 150 fold, at least about 160 fold, at least about 170 fold, at least about 180 fold, at least about 190 fold, at least about 200 fold, at least about 210 fold, at least about 220 fold, at least about 230 fold, at least about 240 fold, at least about 250 fold, at least about 260 fold, at least about 270 fold higher number of Scaffold Y (e.g., a BASP-1 polypeptide) compared to the naturally-occurring EV (e.g., exosome). The number of Scaffold Y, e.g., BASP-1 polypeptide, on the EV (e.g., exosome) of the present disclosure is at least about 100, at least about 200, at least about 300, at least about 400, at least about 500, at least about 600, at least about 700, at least about 800, at least about 900, at least about 1000, at least about 1100, at least about 1200, at least about 1300, at least about 1400, at least about 1500, at least about 1600, at least about 1700, at least about 1800, at least about 1900, at least about 2000, at least about 2100, at least about 2200, at least about 2300, at least about 2400, at least about 2500, at least about 2600, at least about 2700, at least about 2800, at least about 2900, at least about 3000, at least about 4000, at least about 5000, at least about 6000, at least about 7000, at least about 8000, at least about 9000, or at least about 10000. In some aspects, the number of Scaffold Y, e.g., a BASP-1 polypeptide, on the EV (e.g., exosome) of the present disclosure is from about 100 to about 100,000, from about 200 to about 9000, from about 300 to about 9000, from about 400 to about 9000, from about 500 to about 9000, from about 600 to about 8000, from about 800 to about 8000, from about 900 to about 8000, from about 1000 to about 8000, from about 1100 to about 8000, from about 1200 to about 8000, from about 1300 to about 8000, from about 1400 to about 8000, from about 1500 to about 8000, from about 1600 to about 8000, from about 1700 to about 8000, from about 1800 to about 8000, from about 1900 to about 8000, from about 2000 to about 8000, from about 2100 to about 8000, from about 2200 to about 8000, from about 2300 to about 8000, from about 2400 to about 8000, from about 2500 to about 8000, from about 2600, from about 2700 to about 8000, from about 2800 to about 8000, from about 2900 to about 8000, from about 3000 to about 8000, from about 4000 to about 8000, from about 5000 to about 8000, from about 6000 to about 8000, from about 7000 to about 8000, from about 8000, from 7000 to about 9000, or from about 6000 to about 10000. In some aspects, the number of Scaffold Y, e.g., a BASP-1 polypeptide, on the EV (e.g., exosome) of the present disclosure is from about 5000 to about 8000, e.g., about 5000, about 6000, about 7000, or about 8000. In some aspects, the number of Scaffold Y, e.g., a BASP-1 polypeptide, on the EV (e.g., exosome) of the present disclosure is from about 6000 to about 8000, e.g., about 6000, about 7000, or about 8000. In some aspects, the number of Scaffold Y, e.g., a BASP-1 polypeptide, on the EV (e.g., exosome) of the present disclosure is from about 4000 to about 9000, e.g., about 4000, about 5000, about 6000, about 7000, about 8000, about 9000.

[0602] In some aspects, the Scaffold Y useful for the present disclosure comprises an “N-terminus domain” (ND) and an “effector domain” (ED), wherein the ND and/or the ED are associated with the luminal surface of the EV, e.g., an exosome. In some aspects, the Scaffold Y useful for the present disclosure comprises an intracellular domain, a transmembrane domain, and an extracellular domain; wherein the intracellular domain comprises an “N-terminus domain” (ND) and an “effector domain” (ED); wherein the ND and/or the ED are associated with the luminal surface of the EV, e.g., an exosome. As used herein the term “associated with” refers to the interaction between a scaffold protein of the present disclosure with the luminal surface of the EV, e.g., and exosome, that does not involve covalent linking to a membrane component. For example, the scaffolds useful for the present disclosure can be associated with the luminal surface of the EV, e.g., via a lipid anchor (e.g., myristic acid), and/or a polybasic domain that interacts electrostatically with the negatively charged head of membrane phospholipids. In other aspects, the Scaffold Y comprises an N-terminus domain (ND) and an effector domain (ED), wherein the ND is associated with the luminal surface of the EV and the ED are associated with the luminal surface of the EV by an ionic interaction, wherein the ED comprises at least two, at least three, at least four, at least five, at least six, or at least seven contiguous basic amino acids, e.g., lysines (Lys), in sequence.

[0603] In other aspects, the Scaffold Y comprises an N-terminus domain (ND) and an effector domain (ED), wherein the ND is associated with the luminal surface of the EV, and the ED is associated with the luminal surface of the EV by an ionic interaction, wherein the ED comprises at least two, at least three, at least four, at least five, at least six, or at least seven contiguous lysines (Lys) in sequence.

[0604] In some aspects, the ND is associated with the luminal surface of the EV, e.g., an exosome, via lipidation, e.g., via myristoylation. In some aspects, the ND has Gly at the N terminus. In some aspects, the N-terminal Gly is myristoylated.

[0605] In some aspects, the ED is associated with the luminal surface of the EV, e.g., an exosome, by an ionic interaction. In some aspects, the ED is associated with the luminal surface of the EV, e.g., an exosome, by an electrostatic interaction, in particular, an attractive electrostatic interaction.

[0606] In some aspects, the ED comprises (i) a basic amino acid (e.g., lysine), or (ii) two or more basic amino acids (e.g., lysine) next to each other in a polypeptide sequence. In some aspects, the basic amino acid is lysine (Lys; K), arginine (Arg, R), or Histidine (His, H). In some aspects, the basic amino acid is (Lys)n, wherein n is an integer between 1 and 10.

[0607] In other aspects, the ED comprises at least a lysine and the ND comprises a lysine at the C terminus if the N terminus of the ED is directly linked to lysine at the C terminus of the ND, i.e., the lysine is in the N terminus of the ED and is fused to the lysine in the C terminus of the ND. In other aspects, the ED comprises at least two lysines, at least three lysines, at least four lysines, at least five lysines, at least six lysines, or at least seven lysines when the N terminus of the ED is linked to the C terminus of the ND by a linker, e.g., one or more amino acids.

[0608] In some aspects, the ED comprises K, KK, KKK, KKKK (SEQ ID NO: 405), KKKKK (SEQ ID NO: 406), R, RR, RRR, RRRR (SEQ ID NO: 407); RRRRR (SEQ ID NO: 408), KR, RK, KKR, KRK, RKK, KRR, RRK, (K/R)(K/R)(K/R)(K/R) (SEQ ID NO: 409), (K/R)(K/R)(K/R)(K/R)(K/R) (SEQ ID NO: 410), or any combination thereof. In some aspects, the ED comprises KK, KKK, KKKK (SEQ ID NO: 405), KKKKK (SEQ ID NO: 406), or any combination thereof. In some aspects, the ND comprises the amino acid sequence as set forth in G:X2:X3:X4:X5:X6, wherein G represents Gly; wherein “:” represents a peptide bond; wherein each of the X2 to the X6 independently represents an amino acid; and wherein the X6 represents a basic amino acid. In some aspects, the X6 amino acid is selected is selected from the group consisting of Lys, Arg, and His. In some aspects, the X5 amino acid is selected from the group consisting of Pro, Gly, Ala, and Ser. In some aspects, the X2 amino acid is selected from the group consisting of Pro, Gly, Ala, and Ser. In some aspects, the X4 is selected from the group consisting of Pro, Gly, Ala, Ser, Val, Ile, Leu, Phe, Trp, Tyr, Gln, and Met.

[0609] In some aspects, the Scaffold Y comprises an N-terminus domain (ND) and an effector domain (ED), wherein the ND comprises the amino acid sequence as set forth in G:X2:X3:X4:X5:X6, wherein G represents Gly; wherein “:” represents a peptide bond; wherein each of the X2 to the X6 is independently an amino acid; wherein the X6 comprises a basic amino acid, and wherein the ED is linked to X6 by a peptide bond and comprises at least one lysine at the N terminus of the ED.

[0610] In some aspects, the ND of the Scaffold Y comprises the amino acid sequence of G:X2:X3:X4:X5:X6, wherein G represents Gly; “:” represents a peptide bond; the X2 represents an amino acid selected from the group consisting of Pro, Gly, Ala, and Ser; the X3 represents any amino acid; the X4 represents an amino acid selected from the group consisting of Pro, Gly, Ala, Ser, Val, Ile, Leu, Phe, Trp, Tyr, Gln, and Met; the X5 represents an amino acid selected from the group consisting of Pro, Gly, Ala, and Ser; and the X6 represents an amino acid selected from the group consisting of Lys, Arg, and His.

[0611] In some aspects, the X3 amino acid is selected from the group consisting of Asn, Gln, Ser, Thr, Asp, Glu, Lys, His, and Arg.

[0612] In some aspects, the ND and ED are joined by a linker. In some aspects, the linker comprises one or more amino acids. In some aspects, the term “linker” refers to a peptide or polypeptide sequence (e.g., a synthetic peptide or polypeptide sequence) or to a non-polypeptide, e.g., an alkyl chain. In some aspects, two or more linkers can be linked in tandem. Generally, linkers provide flexibility or prevent/ameliorate steric hindrances. Linkers are not typically cleaved; however in certain aspects, such cleavage can be desirable. Accordingly, in some aspects a linker can comprise one or more protease-cleavable sites, which can be located within the sequence of the linker or flanking the linker at either end of the linker sequence. When the ND and ED are joined by a linker, the ED comprise at least two lysines, at least three lysines, at least four lysines, at least five lysines, at least six lysines, or at least seven lysines.

[0613] In some aspects, the linker is a peptide linker. In some aspects, the peptide linker can comprise at least about two, at least about three, at least about four, at least about five, at least about 10, at least about 15, at least about 20, at least about 25, at least about 30, at least about 35, at least about 40, at least about 45, at least about 50, at least about 55, at least about 60, at least about 65, at least about 70, at least about 75, at least about 80, at least about 85, at least about 90, at least about 95, or at least about 100 amino acids.

[0614] In some aspects, the linker is a glycine/serine linker. In some aspects, the peptide linker is glycine/serine linker according to the formula [(Gly)n-Ser]m where n is any integer from 1 to 100 and m is any integer from 1 to 100. In other aspects, the glycine/serine linker is according to the formula [(Gly)x-Sery]z wherein x in an integer from 1 to 4, y is 0 or 1, and z is an integers from 1 to 50. In some aspects, the peptide linker comprises the sequence Gn, where n can be an integer from 1 to 100. In some aspects, the peptide linker can comprise the sequence (GlyAla)n, wherein n is an integer between 1 and 100. In other aspects, the peptide linker can comprise the sequence (GlyGlySer)n, wherein n is an integer between 1 and 100.

[0615] In some aspects, the peptide linker is synthetic, i.e., non-naturally occurring. In one aspect, a peptide linker includes peptides (or polypeptides) (e.g., natural or non-naturally occurring peptides) which comprise an amino acid sequence that links or genetically fuses a first linear sequence of amino acids to a second linear sequence of amino acids to which it is not naturally linked or genetically fused in nature. For example, in one aspect the peptide linker can comprise non-naturally occurring polypeptides which are modified forms of naturally occurring polypeptides (e.g., comprising a mutation such as an addition, substitution or deletion).

[0616] In other aspects, the peptide linker can comprise non-naturally occurring amino acids. In yet other aspects, the peptide linker can comprise naturally occurring amino acids occurring in a linear sequence that does not occur in nature. In still other aspects, the peptide linker can comprise a naturally occurring polypeptide sequence.

[0617] In some aspects, the Scaffold Y comprises ND-ED, wherein: ND comprises G:X2:X3:X4:X5:X6; wherein: G represents Gly; “:” represents a peptide bond; X2 represents an amino acid selected from the group consisting of Pro, Gly, Ala, and Ser; X3 represents any amino acid; X4 represents an amino acid selected from the group consisting of Pro, Gly, Ala, Ser, Val, Ile, Leu, Phe, Trp, Tyr, Glu, and Met; X5 represents an amino acid selected from the group consisting of Pro, Gly, Ala, and Ser; X6 represents an amino acid selected from the group consisting of Lys, Arg, and His; “-” represents an optional linker; and ED is an effector domain comprising (i) at least two contiguous lysines (Lys), which is linked to the X6 by a peptide bond or one or more amino acids or (ii) at least one lysine, which is directly linked to the X6 by a peptide bond.

[0618] In some aspects, the X2 amino acid is selected from the group consisting of Gly and Ala. In some aspects, the X3 amino acid is Lys. In some aspects, the X4 amino acid is Leu or Glu. In some aspects, the X5 amino acid is selected from the group consisting of Ser and Ala. In some aspects, the X6 amino acid is Lys. In some aspects, the X2 amino acid is Gly, Ala, or Ser; the X3 amino acid is Lys or Glu; the X4 amino acid is Leu, Phe, Ser, or Glu; the X5 amino acid is Ser or Ala; and X6 amino acid is Lys. In some aspects, the “-” linker comprises a peptide bond or one or more amino acids.

[0619] In some aspects, the ED in the scaffold protein comprises Lys (K), KK, KKK, KKKK (SEQ ID NO: 405), KKKKK (SEQ ID NO: 406), Arg (R), RR, RRR, RRRR (SEQ ID NO: 407); RRRRR (SEQ ID NO: 408), KR, RK, KKR, KRK, RKK, KRR, RRK, (K/R)(K/R)(K/R)(K/R) (SEQ ID NO: 409), (K/R)(K/R)(K/R)(K/R)(K/R) (SEQ ID NO: 410), or any combination thereof.

[0620] In some aspects, the Scaffold Y comprises an amino acid sequence selected from the group consisting of (i) GGKLSKK (SEQ ID NO: 411), (ii) GAKLSKK (SEQ ID NO: 412), (iii) GGKQSKK (SEQ ID NO: 413), (iv) GGKLAKK (SEQ ID NO: 414), or (v) any combination thereof.

[0621] In some aspects, the ND in the Scaffold Y comprises an amino acid sequence selected from the group consisting of (i) GGKLSK (SEQ ID NO: 415), (ii) GAKLSK (SEQ ID NO: 416), (iii) GGKQSK (SEQ ID NO: 417), (iv) GGKLAK (SEQ ID NO: 418), or (v) any combination thereof and the ED in the scaffold protein comprises (i) K, KK, KKK, KKKG (SEQ ID NO: 419), KKKGY (SEQ ID NO: 420), KKKGYN (SEQ ID NO: 421), KKKGYNV (SEQ ID NO: 422), KKKGYNVN (SEQ ID NO: 423), KKKGYS (SEQ ID NO: 424), KKKGYG (SEQ ID NO: 425), KKKGYGG (SEQ ID NO: 426), KKKGS (SEQ ID NO: 427), KKKGSG (SEQ ID NO: 428), KKKGSGS (SEQ ID NO: 429), KKKS (SEQ ID NO: 430), KKKSG (SEQ ID NO: 431), KKKSGG (SEQ ID NO: 432), KKKSGGS (SEQ ID NO: 433), KKKSGGSG (SEQ ID NO: 434), KKSGGSGG (SEQ ID NO: 435), KKKSGGSGGS (SEQ ID NO: 436), KRFSFKKS (SEQ ID NO: 437).

[0622] In some aspects, the polypeptide sequence of a Scaffold Y useful for the present disclosure consists of an amino acid sequence selected from the group consisting of (i) GGKLSKK (SEQ ID NO: 411), (ii) GAKLSKK (SEQ ID NO: 412), (iii) GGKQSKK (SEQ ID NO: 413), (iv) GGKLAKK (SEQ ID NO: 414), or (v) any combination thereof.

[0623] In some aspects, the Scaffold Y comprises an amino acid sequence selected from the group consisting of (i) GGKLSKKK (SEQ ID NO: 438), (ii) GGKLSKKS (SEQ ID NO: 439), (iii) GAKLSKKK (SEQ ID NO: 440), (iv) GAKLSKKS (SEQ ID NO: 441), (v) GGKQSKKK (SEQ ID NO: 442), (vi) GGKQSKKS (SEQ ID NO: 443), (vii) GGKLAKKK (SEQ ID NO: 444), (viii) GGKLAKKS (SEQ ID NO: 445), and (ix) any combination thereof.

[0624] In some aspects, the polypeptide sequence of a Scaffold Y useful for the present disclosure consists of an amino acid sequence selected from the group consisting of (i) GGKLSKKK (SEQ ID NO: 438), (ii) GGKLSKKS (SEQ ID NO: 439), (iii) GAKLSKKK (SEQ ID NO: 440), (iv) GAKLSKKS (SEQ ID NO: 441), (v) GGKQSKKK (SEQ ID NO: 442), (vi) GGKQSKKS (SEQ ID NO: 443), (vii) GGKLAKKK (SEQ ID NO: 444), (viii) GGKLAKKS (SEQ ID NO: 445), and (ix) any combination thereof.

[0625] In some aspects, the Scaffold Y is at least about 8, at least about 9, at least about 10, at least about 11, at least about 12, at least about 13, at least about 14, at least about 15, at least about 16, at least about 17, at least about 18, at least about 19, at least about 20, at least about 21, at least about 22, at least about 23, at least about 24, at least about 25, at least about 26, at least about 27, at least about 28, at least about 29, at least about 30, at least 31, at least about 32, at least about 33, at least about 34, at least about 35, at least about 36, at least about 37, at least about 38, at least about 39, at least about 39, at least about 40, at least about 41, at least about 42, at least about 43, at least about 44, at least about 50, at least about 46, at least about 47, at least about 48, at least about 49, at least about 50, at least about 55, at least about 60, at least about 65, at least about 70, at least about 75, at least about 80, at least 85, at least about 90, at least about 95, at least about 100, at least about 105, at least about 110, at least about 115, at least about 120, at least about 125, at least about 130, at least about 135, at least about 140, at least about 145, at least about 150, at least about 155, at least about 160, at least about 165, at least about 170, at least about 175, at least about 180, at least about 185, at least about 190, at least about 195, at least about 200, at least about 205, at least about 210, at least about 215, at least about 220, at least about 225, at least about 230, at least about 235, at least about 240, at least about 245, at least about 250, at least about 255, at least about 260, at least about 265, at least about 270, at least about 275, at least about 280, at least about 285, at least about 290, at least about 295, at least about 300, at least about 305, at least about 310, at least about 315, at least about 320, at least about 325, at least about 330, at least about 335, at least about 340, at least about 345, or at least about 350 amino acids in length.

[0626] In some aspects, the Scaffold Y is between about 5 and about 10, between about 10 and about 20, between about 20 and about 30, between about 30 and about 40, between about 40 and about 50, between about 50 and about 60, between about 60 and about 70, between about 70 and about 80, between about 80 and about 90, between about 90 and about 100, between about 100 and about 110, between about 110 and about 120, between about 120 and about 130, between about 130 and about 140, between about 140 and about 150, between about 150 and about 160, between about 160 and about 170, between about 170 and about 180, between about 180 and about 190, between about 190 and about 200, between about 200 and about 210, between about 210 and about 220, between about 220 and about 230, between about 230 and about 240, between about 240 and about 250, between about 250 and about 260, between about 260 and about 270, between about 270 and about 280, between about 280 and about 290, between about 290 and about 300, between about 300 and about 310, between about 310 and about 320, between about 320 and about 330, between about 330 and about 340, or between about 340 and about 250 amino acids in length. In some aspects, the Scaffold Y comprises (i) GGKLSKKKKGYNVN (SEQ ID NO: 446), (ii) GAKLSKKKKGYNVN (SEQ ID NO: 447), (iii) GGKQSKKKKGYNVN (SEQ ID NO: 448), (iv) GGKLAKKKKGYNVN (SEQ ID NO: 449), (v) GGKLSKKKKGYSGG (SEQ ID NO: 450), (vi) GGKLSKKKKGSGGS (SEQ ID NO: 451), (vii) GGKLSKKKKSGGSG (SEQ ID NO: 452), (viii) GGKLSKKKSGGSGG (SEQ ID NO: 453), (ix) GGKLSKKSGGSGGS (SEQ ID NO: 454), (x) GGKLSKSGGSGGSV (SEQ ID NO: 455), or (xi) GAKKSKKRFSFKKS (SEQ ID NO: 456).

[0627] In some aspects, the polypeptide sequence of a Scaffold Y useful for the present disclosure consists of (i) GGKLSKKKKGYNVN (SEQ ID NO: 446), (ii) GAKLSKKKKGYNVN (SEQ ID NO: 447), (iii) GGKQSKKKKGYNVN (SEQ ID NO: 448), (iv) GGKLAKKKKGYNVN (SEQ ID NO: 449), (v) GGKLSKKKKGYSGG (SEQ ID NO: 450), (vi) GGKLSKKKKGSGGS (SEQ ID NO: 451), (vii) GGKLSKKKKSGGSG (SEQ ID NO: 452), (viii) GGKLSKKKSGGSGG (SEQ ID NO: 453), (ix) GGKLSKKSGGSGGS (SEQ ID NO: 454), (x) GGKLSKSGGSGGSV (SEQ ID NO: 455), or (xi) GAKKSKKRFSFKKS (SEQ ID NO: 465).

[0628] Non-limiting examples of the Scaffold Y useful for the present disclosure are listed below. In some aspects, the Scaffold Y comprises an amino acid sequence set forth in SEQ ID NO: 457 to 567. In some aspects, the Scaffold Y consists of an amino acid sequence set forth in SEQ ID NO: 457 to 567.

[0629] In some aspects, the Scaffold Y useful for the present disclosure does not contain an N-terminal Met. In some aspects, the Scaffold Y comprises a lipidated amino acid, e.g., a myristoylated amino acid, at the N-terminus of the scaffold protein, which functions as a lipid anchor. In some aspects, the amino acid residue at the N-terminus of the scaffold protein is Gly. The presence of an N-terminal Gly is an absolute requirement for N-myristoylation. In some aspects, the amino acid residue at the N-terminus of the scaffold protein is synthetic. In some aspects, the amino acid residue at the N-terminus of the scaffold protein is a glycine analog, e.g., allylglycine, butylglycine, or propargylglycine.

[0630] In other aspects, the lipid anchor can be any lipid anchor known in the art, e.g., palmitic acid or glycosylphosphatidylinositols. Under unusual circumstances, e.g., by using a culture medium where myristic acid is limiting, some other fatty acids including shorter-chain and unsaturated, can be attached to the N-terminal glycine. For example, in BK channels, myristate has been reported to be attached posttranslationally to internal serine/threonine or tyrosine residues via a hydroxyester linkage. Membrane anchors known in the art are presented in the following table.

| Modification | Modifying Group |
|---|---|
| S-Palmitoylation | [chemical structure] |
| N-Palmitoylation | [chemical structure] |
| N-Myristoylation | [chemical structure] |
| O-Acylation | [chemical structure] |
| Farnesylation | [chemical structure] |
| Geranylgeranylation | [chemical structure] |
| Cholesterol | [chemical structure] |

### III. Methods of Making

[0631] EVs (e.g., exosomes) of the present disclosure can be produced by chemical synthesis, recombinant DNA technology, biochemical or enzymatic fragmentation of larger molecules, combinations of the foregoing or by any other method. In one aspect, the present disclosure provides a method of conjugating a biologically active molecule to an EV (e.g., exosome). The method comprises linking a biologically active molecule to an EV (e.g., exosome) via a maleimide moiety as described above.

[0632] Besides amine-reactive compounds, those having chemical groups that form bonds with sulfhydryls (—SH) are the most common crosslinkers and modification reagents for protein and other bioconjugate techniques. Sulfhydryls, also called thiols, exist in proteins in the side-chain of cysteine (Cys, C) amino acids. Pairs of cysteine sulfhydryl groups are often linked by disulfide bonds (—S—S—) within or between polypeptide chains as the basis of native tertiary or quaternary protein structure. Typically, only free or reduced sulfhydryl groups (—SH) [rather than sulfur atoms in disulfide bonds] are available for reaction with thiol-reactive compounds.

[0633] Sulfhydryl groups are useful targets for protein conjugation and labeling. First, sulfhydryls are present in most proteins but are not as numerous as primary amines; thus, crosslinking via sulfhydryl groups is more selective and precise. Second, sulfhydryl groups in proteins are often involved in disulfide bonds, so crosslinking at these sites typically does not significantly modify the underlying protein structure or block binding sites. Third, the number of available (i.e., free) sulfhydryl groups can be easily controlled or modified; they can be generated by reduction of native disulfide bonds, or they can be introduced into molecules through reaction with primary amines using sulfhydryl-addition reagents, such as 2-iminothiolane (Traut's Reagent), SATA, SATP, or SAT(PEG). Finally, combining sulfhydryl-reactive groups with amine-reactive groups to make heterobifunctional crosslinkers provides greater flexibility and control over crosslinking procedures. For example, using 3-Maleimido-propionic NHS ester, which contains a maleimide group and an NHS ester, the NHS ester can be used to label the primary amines (—NH2) of proteins, amine-modified oligonucleotides, and other amine-containing molecules. The maleimide group will react with a thiol group to form a covalent bond, enabling the connection of biomolecule with a thiol.

[0634] The maleimide group reacts specifically with sulfhydryl groups when the pH of the reaction mixture is between 6.5 and 7.5; the result is formation of a stable thioether linkage that is not reversible (i.e., the bond cannot be cleaved with reducing agents). In more alkaline conditions (pH>8.5), the reaction favors primary amines and also increases the rate of hydrolysis of the maleimide group to a non-reactive maleamic acid. Maleimides do not react with tyrosines, histidines or methionines.

[0635] Thiol-containing compounds, such as dithiothreitol (DTT) and beta-mercaptoethanol (BME), must be excluded from reaction buffers used with maleimides because they will compete for coupling sites. For example, if DTT were used to reduce disulfides in a protein to make sulfhydryl groups available for conjugation, the DTT would have to be thoroughly removed using a desalting column before initiating the maleimide reaction. Interestingly, the disulfide-reducing agent TCEP does not contain thiols and does not have to be removed before reactions involving maleimide reagents.

[0636] Excess maleimides can be quenched at the end of a reaction by adding free thiols. EDTA can be included in the coupling buffer to chelate stray divalent metals that otherwise promote oxidation of sulfhydryls (non-reactive).

[0637] In one aspect, the linking comprises treating the EV (e.g., exosome) with a reducing agent. Suitable reducing agents include, for example, TCEP (Tris(2-carboxyethyl)phosphine), DTT (dithiothreitol), BME (2-mercaptoethanol), a thiolating agent, and any combination thereof. The thiolating agent can comprise, e.g., Traut's reagent (2-iminothiolane).

[0638] After the treatment with the reducing agent, the linking reaction further comprises bringing the reduced EV (e.g., exosome) in contact with the maleimide moiety. In one aspect, the maleimide moiety is linked to a biologically active molecule prior to the linking to the EV (e.g., exosome). In some aspects, the maleimide moiety is further attached to a linker to connect the maleimide moiety to the biologically active molecule. Accordingly, in some aspects, one or more linkers or spacers are interposed between the maleimide moiety and the biologically active molecule.

[0639] In some aspects, EVs disclosed herein (e.g., exosomes) can be produced from a cell grown in vitro or a body fluid of a subject. When exosomes are produced from in vitro cell culture, various producer cells, e.g., HEK293 cells, CHO cells, and MSCs, can be used. In certain aspects, the producer cell is HEK293 cells. In some aspects, a producer cell is not a dendritic cell, macrophage, B cell, mast cell, neutrophil, Kupffer-Browicz cell, cell derived from any of these cells, or any combination thereof.

[0640] Human embryonic kidney 293 cells, also often referred to as HEK 293, HEK-293, 293 cells, or less precisely as HEK cells, are a specific cell line originally derived from human embryonic kidney cells grown in tissue culture.

[0641] HEK 293 cells were generated in 1973 by transfection of cultures of normal human embryonic kidney cells with sheared adenovirus 5 DNA in Alex van der Eb's laboratory in Leiden, the Netherlands. The cells were cultured and transfected by adenovirus. Subsequent analysis has shown that the transformation was brought about by inserting ˜4.5 kilobases from the left arm of the viral genome, which became incorporated into human chromosome 19.

[0642] A comprehensive study of the genomes and transcriptomes of HEK 293 and five derivative cell lines compared the HEK 293 transcriptome with that of human kidney, adrenal, pituitary and central nervous tissue. The HEK 293 pattern most closely resembled that of adrenal cells, which have many neuronal properties.

[0643] HEK 293 cells have a complex karyotype, exhibiting two or more copies of each chromosome and with a modal chromosome number of 64. They are described as hypotriploid, containing less than three times the number of chromosomes of a haploid human gamete. Chromosomal abnormalities include a total of three copies of the X chromosome and four copies of chromosome 17 and chromosome 22.

[0644] Variants of HEK293 cells useful to produce EVs include, but are not limited to, HEK 293F, HEK 293FT, and HEK 293T.

### IV. Therapeutic Uses

[0645] The present disclosure provides methods of treating a disease or condition is a subject in need thereof comprising administering a composition comprising EVs (e.g., exosomes) of the present disclosure to the subject. The present disclosure also provides methods of preventing or ameliorating the symptoms of a disease or condition is a subject in need thereof comprising administering a composition comprising EVs (e.g., exosomes) of the present disclosure to the subject. Also provided are methods to diagnose a disease or condition in a subject in need thereof comprising administering a composition comprising EVs (e.g., exosomes) of the present disclosure to the subject.

[0646] In one aspect, the disease or disorder is a cancer, an inflammatory disease, a neurodegenerative disorder, a central nervous disease or a metabolic disease.

[0647] Present disclosure also provides methods of preventing and/or treating a disease or disorder in a subject in need thereof, comprising administering an EV (e.g., exosome) disclosed herein to the subject. In some aspects, a disease or disorder that can be treated with the present methods comprises a cancer, graft-versus-host disease (GvHD), autoimmune disease, infectious diseases, or fibrotic diseases. In some aspects, the treatment is prophylactic. In other aspects, the EVs (e.g., exosomes) for the present disclosure are used to induce an immune response. In other aspects, the EVs (e.g., exosomes) for the present disclosure are used to vaccinate a subject.

[0648] In some aspects, the disease or disorder is a cancer. When administered to a subject with a cancer, in certain aspects, EVs (e.g., exosomes) of the present disclosure can up-regulate an immune response and enhance the tumor targeting of the subject's immune system. In some aspects, the cancer being treated is characterized by infiltration of leukocytes (T-cells, B-cells, macrophages, dendritic cells, monocytes) into the tumor microenvironment, or so-called “hot tumors” or “inflammatory tumors.” In some aspects, the cancer being treated is characterized by low levels or undetectable levels of leukocyte infiltration into the tumor microenvironment, or so-called “cold tumors” or “non-inflammatory tumors.” In some aspects, an EV (e.g., exosome) is administered in an amount and for a time sufficient to convert a “cold tumor” into a “hot tumor,” i.e., said administering results in the infiltration of leukocytes (such as T-cells) into the tumor microenvironment. In certain aspects, cancer comprises bladder cancer, cervical cancer, renal cell cancer, testicular cancer, colorectal cancer, lung cancer, head and neck cancer, and ovarian, lymphoma, liver cancer, glioblastoma, melanoma, myeloma, leukemia, pancreatic cancers, or combinations thereof. In other The term “distal tumor” or “distant tumor” refers to a tumor that has spread from the original (or primary) tumor to distant organs or distant tissues, e.g., lymph nodes. In some aspects, the EVs (e.g., exosomes) of the disclosure treats a tumor after the metastatic spread.

[0649] In some aspects, the disease or disorder is a graft-versus-host disease (GvHD). In some aspects, the disease or disorder that can be treated with the present disclosure is an autoimmune disease. Non-limiting examples of autoimmune diseases include: multiple sclerosis, peripheral neuritis, Sjogren's syndrome, rheumatoid arthritis, alopecia, autoimmune pancreatitis, Behcet's disease, Bullous pemphigoid, Celiac disease, Devic's disease (neuromyelitis optica), Glomerulonephritis, IgA nephropathy, assorted vasculitides, scleroderma, diabetes, arteritis, vitiligo, ulcerative colitis, irritable bowel syndrome, psoriasis, uveitis, systemic lupus erythematosus, and combinations thereof.

[0650] In some aspects, the disease or disorder is an infectious disease. In certain aspects, the disease or disorder is an oncogenic virus. In some aspects, infectious diseases that can be treated with the present disclosure includes, but not limited to, Human Gamma herpes virus 4 (Epstein Barr virus), influenza A virus, influenza B virus, cytomegalovirus, Staphylococcus aureus, Mycobacterium tuberculosis, Chlamydia trachomatis, HIV-1, HIV-2, corona viruses (e.g., MERS-CoV and SARS CoV), filoviruses (e.g., Marburg and Ebola), Streptococcus pyogenes, Streptococcus pneumoniae, Plasmodia species (e.g., vivax and falciparum), Chikunga virus, Human Papilloma virus (HPV), Hepatitis B, Hepatitis C, human herpes virus 8, herpes simplex virus 2 (HSV2), Klebsiella sp., Pseudomonas aeruginosa, Enterococcus sp., Proteus sp., Enterobacter sp., Actinobacter sp., coagulase-negative staphylococci (CoNS), Mycoplasma sp., or combinations thereof.

[0651] In some aspects, the EVs (e.g., exosomes) are administered intravenously to the circulatory system of the subject. In some aspects, the EVs (e.g., exosomes) are infused in suitable liquid and administered into a vein of the subject.

[0652] In some aspects, the EVs (e.g., exosomes) are administered intra-arterialy to the circulatory system of the subject. In some aspects, the EVs (e.g., exosomes) are infused in suitable liquid and administered into an artery of the subject.

[0653] In some aspects, the EVs (e.g., exosomes) are administered to the subject by intrathecal administration. In some aspects, the EVs (e.g., exosomes) are administered via an injection into the spinal canal, or into the subarachnoid space so that it reaches the cerebrospinal fluid (CSF).

[0654] In some aspects, the EVs (e.g., exosomes) are administered intratumorally into one or more tumors of the subject.

[0655] In some aspects, the EVs (e.g., exosomes) are administered to the subject by intranasal administration. In some aspects, the EVs (e.g., exosomes) can be insufflated through the nose in a form of either topical administration or systemic administration. In certain aspects, the EVs (e.g., exosomes) are administered as nasal spray.

[0656] In some aspects, the EVs (e.g., exosomes) are administered to the subject by intraperitoneal administration. In some aspects, the EVs (e.g., exosomes) are infused in suitable liquid and injected into the peritoneum of the subject. In some aspects, the intraperitoneal administration results in distribution of the EVs (e.g., exosomes) to the lymphatics. In some aspects, the intraperitoneal administration results in distribution of the EVs (e.g., exosomes) to the thymus, spleen, and/or bone marrow. In some aspects, the intraperitoneal administration results in distribution of the EVs (e.g., exosomes) to one or more lymph nodes. In some aspects, the intraperitoneal administration results in distribution of the EVs (e.g., exosomes) to one or more of the cervical lymph node, the inguinal lymph node, the mediastinal lymph node, or the sternal lymph node. In some aspects, the intraperitoneal administration results in distribution of the EVs (e.g., exosomes) to the pancreas.

[0657] In some aspects, the EVs (e.g., exosomes) are administered to the subject by periocular administration. In some aspects, the EVs (e.g., exosomes) are injected into the periocular tissues. Periocular drug administration includes the routes of subconjunctival, anterior sub-Tenon's, posterior sub-Tenon's, and retrobulbar administration.

### V. Pharmaceutical Compositions and Methods of Administration

[0658] The present disclosure also provides pharmaceutical compositions comprising EVs (e.g., exosomes) described herein that are suitable for administration to a subject. The pharmaceutical compositions generally comprise a plurality of EVs (e.g., exosomes) comprising a biologically active molecule covalently linked to the plurality of EVs (e.g., exosomes) via a maleimide moiety and a pharmaceutically-acceptable excipient or carrier in a form suitable for administration to a subject. Pharmaceutically acceptable excipients or carriers are determined in part by the particular composition being administered, as well as by the particular method used to administer the composition. Accordingly, there is a wide variety of suitable formulations of pharmaceutical compositions comprising a plurality of EVs (e.g., exosomes). (See, e.g., Remington's Pharmaceutical Sciences, Mack Publishing Co., Easton, Pa. 18th ed. (1990)). The pharmaceutical compositions are generally formulated sterile and in full compliance with all Good Manufacturing Practice (GMP) regulations of the U.S. Food and Drug Administration. In some aspects, the pharmaceutical composition comprises one or more chemical compounds, such as for example, small molecules covalently linked to an EV (e.g., exosome) described herein.

[0659] In some aspects, a pharmaceutical composition comprises one or more therapeutic agents and an EV (e.g., exosome) described herein. In certain aspects, the EVs (e.g., exosomes) are co-administered with of one or more additional therapeutic agents, in a pharmaceutically acceptable carrier. In some aspects, the pharmaceutical composition comprising the EV (e.g., exosome) is administered prior to administration of the additional therapeutic agents. In other aspects, the pharmaceutical composition comprising the EV (e.g., exosome) is administered after the administration of the additional therapeutic agents. In further aspects, the pharmaceutical composition comprising the EV (e.g., exosome) is administered concurrently with the additional therapeutic agents.

[0660] Provided herein are pharmaceutical compositions comprising an EV (e.g., exosome) of the present disclosure having the desired degree of purity, and a pharmaceutically acceptable carrier or excipient, in a form suitable for administration to a subject. Pharmaceutically acceptable excipients or carriers can be determined in part by the particular composition being administered, as well as by the particular method used to administer the composition. Accordingly, there is a wide variety of suitable formulations of pharmaceutical compositions comprising a plurality of extracellular vesicles. (See, e.g., Remington's Pharmaceutical Sciences, Mack Publishing Co., Easton, Pa. 21st ed. (2005)). The pharmaceutical compositions are generally formulated sterile and in full compliance with all Good Manufacturing Practice (GMP) regulations of the U.S. Food and Drug Administration.

[0661] In some aspects, a pharmaceutical composition comprises one or more therapeutic agents and an EV (e.g., exosome) described herein. In certain aspects, the EVs (e.g., exosomes) are co-administered with of one or more additional therapeutic agents, in a pharmaceutically acceptable carrier. In some aspects, the pharmaceutical composition comprising the EV (e.g., exosome) is administered prior to administration of the additional therapeutic agents. In other aspects, the pharmaceutical composition comprising the EV (e.g., exosome) is administered after the administration of the additional therapeutic agents. In further aspects, the pharmaceutical composition comprising the EV (e.g., exosome) is administered concurrently with the additional therapeutic agents.

[0662] Acceptable carriers, excipients, or stabilizers are nontoxic to recipients (e.g., animals or humans) at the dosages and concentrations employed, and include buffers such as phosphate, citrate, and other organic acids; antioxidants including ascorbic acid and methionine; preservatives (such as octadecyldimethylbenzyl ammonium chloride; hexamethonium chloride; benzalkonium chloride, benzethonium chloride; phenol, butyl or benzyl alcohol; alkyl parabens such as methyl or propyl paraben; catechol; resorcinol; cyclohexanol; 3-pentanol; and m-cresol); low molecular weight (less than about 10 residues) polypeptides; proteins, such as serum albumin, gelatin, or immunoglobulins; hydrophilic polymers such as polyvinylpyrrolidone; amino acids such as glycine, glutamine, asparagine, histidine, arginine, or lysine; monosaccharides, disaccharides, and other carbohydrates including glucose, mannose, or dextrins; chelating agents such as EDTA; sugars such as sucrose, mannitol, trehalose or sorbitol; salt-forming counter-ions such as sodium; metal complexes (e.g., Zn-protein complexes); and/or non-ionic surfactants such as TWEEN™, PLURONICS™ or polyethylene glycol (PEG).

[0663] Examples of carriers or diluents include, but are not limited to, water, saline, Ringer's solutions, dextrose solution, and 5% human serum albumin. The use of such media and compounds for pharmaceutically active substances is well known in the art. Except insofar as any conventional media or compound is incompatible with the extracellular vesicles described herein, use thereof in the compositions is contemplated. Supplementary therapeutic agents can also be incorporated into the compositions. Typically, a pharmaceutical composition is formulated to be compatible with its intended route of administration. The EVs (e.g., exosomes) of the present disclosure can be administered by parenteral, topical, intravenous, oral, subcutaneous, intra-arterial, intradermal, transdermal, rectal, intracranial, intraperitoneal, intranasal, intratumoral, intramuscular route or as inhalants. In certain aspects, the pharmaceutical composition comprising EVs (e.g., exosomes) is administered intravenously, e.g. by injection. The EVs (e.g., exosomes) can optionally be administered in combination with other therapeutic agents that are at least partly effective in treating the disease, disorder or condition for which the EVs (e.g., exosomes) are intended.

[0664] Solutions or suspensions can include the following components: a sterile diluent such as water, saline solution, fixed oils, polyethylene glycols, glycerine, propylene glycol or other synthetic solvents; antibacterial compounds such as benzyl alcohol or methyl parabens; antioxidants such as ascorbic acid or sodium bisulfite; chelating compounds such as ethylenediaminetetraacetic acid (EDTA); buffers such as acetates, citrates or phosphates, and compounds for the adjustment of tonicity such as sodium chloride or dextrose. The pH can be adjusted with acids or bases, such as hydrochloric acid or sodium hydroxide. The preparation can be enclosed in ampoules, disposable syringes or multiple dose vials made of glass or plastic.

[0665] Pharmaceutical compositions suitable for injectable use include sterile aqueous solutions (if water soluble) or dispersions and sterile powders. For intravenous administration, suitable carriers include physiological saline, bacteriostatic water, Cremophor EL™ (BASF, Parsippany, N.J.) or phosphate buffered saline (PBS). The composition is generally sterile and fluid to the extent that easy syringeability exists. The carrier can be a solvent or dispersion medium containing, e.g., water, ethanol, polyol (e.g., glycerol, propylene glycol, and liquid polyethylene glycol, and the like), and suitable mixtures thereof. The proper fluidity can be maintained, e.g., by the use of a coating such as lecithin, by the maintenance of the required particle size in the case of dispersion and by the use of surfactants. Prevention of the action of microorganisms can be achieved by various antibacterial and antifungal compounds, e.g., parabens, chlorobutanol, phenol, ascorbic acid, thimerosal, and the like. If desired, isotonic compounds, e.g., sugars, polyalcohols such as mannitol, sorbitol, and sodium chloride can be added to the composition. Prolonged absorption of the injectable compositions can be brought about by including in the composition a compound which delays absorption, e.g., aluminum monostearate and gelatin.

[0666] Sterile injectable solutions can be prepared by incorporating the EVs (e.g., exosomes) of the present disclosure in an effective amount and in an appropriate solvent with one or a combination of ingredients enumerated herein, as desired. Generally, dispersions are prepared by incorporating the EVs (e.g., exosomes) into a sterile vehicle that contains a basic dispersion medium and any desired other ingredients. In the case of sterile powders for the preparation of sterile injectable solutions, methods of preparation are vacuum drying and freeze-drying that yields a powder of the active ingredient plus any additional desired ingredient from a previously sterile-filtered solution thereof. The EVs (e.g., exosomes) can be administered in the form of a depot injection or implant preparation which can be formulated in such a manner to permit a sustained or pulsatile release of the EVs (e.g., exosomes).

[0667] Systemic administration of compositions comprising EVs (e.g., exosomes) of the present disclosure can also be by transmucosal means. For transmucosal administration, penetrants appropriate to the barrier to be permeated are used in the formulation. Such penetrants are generally known in the art, and include, e.g., for transmucosal administration, detergents, bile salts, and fusidic acid derivatives. Transmucosal administration can be accomplished through the use of, e.g., nasal sprays.

[0668] In certain aspects the pharmaceutical composition comprising EVs (e.g., exosomes) of the present disclosure is administered intravenously into a subject that would benefit from the pharmaceutical composition. In certain other aspects, the composition is administered to the lymphatic system, e.g., by intralymphatic injection or by intranodal injection (see e.g., Senti et al., PNAS 105(46): 17908 (2008)), or by intramuscular injection, by subcutaneous administration, by intratumoral injection, by direct injection into the thymus, or into the liver.

[0669] In certain aspects, the pharmaceutical composition comprising EVs (e.g., exosomes) of the present disclosure is administered as a liquid suspension. In certain aspects, the pharmaceutical composition is administered as a formulation that is capable of forming a depot following administration. In certain preferred aspects, the depot slowly releases the EVs (e.g., exosomes) into circulation, or remains in depot form.

[0670] Typically, pharmaceutically-acceptable compositions are highly purified to be free of contaminants, are biocompatible and not toxic, and are suited to administration to a subject. If water is a constituent of the carrier, the water is highly purified and processed to be free of contaminants, e.g., endotoxins.

[0671] The pharmaceutically-acceptable carrier can be lactose, dextrose, sucrose, sorbitol, mannitol, starch, gum acacia, calcium phosphate, alginates, gelatin, calcium silicate, micro-crystalline cellulose, polyvinylpyrrolidone, cellulose, water, syrup, methyl cellulose, methylhydroxy benzoate, propylhydroxy benzoate, talc, magnesium stearate, and/or mineral oil, but is not limited thereto. The pharmaceutical composition can further include a lubricant, a wetting agent, a sweetener, a flavor enhancer, an emulsifying agent, a suspension agent, and/or a preservative.

[0672] The pharmaceutical compositions described herein comprise the EVs (e.g., exosomes) described herein and optionally a pharmaceutically active or therapeutic agent. The therapeutic agent can be a biological agent, a small molecule agent, or a nucleic acid agent.

[0673] Dosage forms are provided that comprise a pharmaceutical composition comprising the EVs (e.g., exosomes) described herein. In some aspects, the dosage form is formulated as a liquid suspension for intravenous injection. In some aspects, the dosage form is formulated as a liquid suspension for intratumoral injection.

[0674] In certain aspects, the preparation of EVs (e.g., exosomes) of the present disclosure is subjected to radiation, e.g., X rays, gamma rays, beta particles, alpha particles, neutrons, protons, elemental nuclei, UV rays in order to damage residual replication-competent nucleic acids.

[0675] In certain aspects, the preparation of EVs (e.g., exosomes) of the present disclosure is subjected to gamma irradiation using an irradiation dose of more than 1, 5, 10, 15, 20, 25, 30, 35, 40, 50, 60, 70, 80, 90, 100, or more than 100 kGy.

[0676] In certain aspects, the preparation of EVs (e.g., exosomes) of the present disclosure is subjected to X-ray irradiation using an irradiation dose of more than 0.1, 0.5, 1, 5, 10, 15, 20, 25, 30, 35, 40, 50, 60, 70, 80, 90, 100, 200, 300, 400, 500, 600, 700, 800, 900, 1000, 2000, 3000, 4000, 5000, 6000, 7000, 8000, 9000, 10000, or

[0677] The EVs (e.g., exosomes) of the present disclosure may be used concurrently with other drugs. To be specific, the EVs (e.g., exosomes) of the present disclosure may be used together with medicaments such as hormonal therapeutic agents, chemotherapeutic agents, immunotherapeutic agents, medicaments inhibiting the action of cell growth factors or cell growth factor receptors and the like.

### VI. Kits

[0678] The present disclosure also provides kits, or products of manufacture comprising one or more EVs (e.g., exosomes) of the present disclosure and optionally instructions for use. In some aspects, the kit, or product of manufacture contains a pharmaceutical composition described herein which comprises at least one EV (e.g., exosome) of the present disclosure, and instructions for use. In some aspects, the kit, or product of manufacture comprises at least one EV (e.g., exosome) of the present disclosure or a pharmaceutical composition comprising the EVs (e.g., exosomes) in one or more containers. One skilled in the art will readily recognize that the EVs (e.g., exosomes) of the present disclosure, pharmaceutical composition comprising the EVs (e.g., exosomes) of the present disclosure, or combinations thereof can be readily incorporated into one of the established kit formats which are well known in the art.

[0679] In some aspects, the kit, or product of manufacture comprises EVs (e.g., exosomes) one or more biologically active molecules, reagents to covalently attach the one or more biologically active molecules to the EVs (e.g., exosomes) via a maleimide moiety, or any combination thereof, and instructions to conduct the reaction to covalently attach the one or more biologically active molecules to the EVs (e.g., exosomes) via a maleimide moiety.

[0680] In some aspects, the kit comprises reagents to conjugate a biologically active molecule to an EV (e.g., exosome) via a maleimide moiety, and instructions to conduct the conjugation.

[0681] The practice of the present disclosure will employ, unless otherwise indicated, conventional techniques of cell biology, cell culture, molecular biology, transgenic biology, microbiology, recombinant DNA, and immunology, which are within the skill of the art. Such techniques are explained fully in the literature. See, for example, Sambrook et al., ed. (1989) Molecular Cloning A Laboratory Manual (2nd ed.; Cold Spring Harbor Laboratory Press); Sambrook et al., ed. (1992) Molecular Cloning: A Laboratory Manual, (Cold Springs Harbor Laboratory, NY); D. N. Glover ed., (1985) DNA Cloning, Volumes I and II; Gait, ed. (1984) Oligonucleotide Synthesis; Mullis et al. U.S. Pat. No. 4,683,195; Hames and Higgins, eds. (1984) Nucleic Acid Hybridization; Hames and Higgins, eds. (1984) Transcription And Translation; Freshney (1987) Culture Of Animal Cells (Alan R. Liss, Inc.); Immobilized Cells And Enzymes (IRL Press) (1986); Perbal (1984) A Practical Guide To Molecular Cloning; the treatise, Methods In Enzymology (Academic Press, Inc., N.Y.); Miller and Calos eds. (1987) Gene Transfer Vectors For Mammalian Cells, (Cold Spring Harbor Laboratory); Wu et al., eds., Methods In Enzymology, Vols. 154 and 155; Mayer and Walker, eds. (1987) Immunochemical Methods In Cell And Molecular Biology (Academic Press, London); Weir and Blackwell, eds., (1986) Handbook Of Experimental Immunology, Volumes I-IV; Manipulating the Mouse Embryo, Cold Spring Harbor Laboratory Press, Cold Spring Harbor, N.Y., (1986); Crooke, Antisense drug Technology: Principles, Strategies and Applications, 2nd Ed. CRC Press (2007) and in Ausubel et al. (1989) Current Protocols in Molecular Biology (John Wiley and Sons, Baltimore, Md.).

[0682] All of the references cited above, as well as all references cited herein, are incorporated herein by reference in their entireties.

[0683] The following examples are offered by way of illustration and not by way of limitation.

### EXAMPLES

[0684] The following examples are provided for illustrative purposes only, and are not to be construed as limiting the scope or content of the invention in any way. The practice of the current invention will employ, unless otherwise indicated, conventional methods of protein chemistry, biochemistry, recombinant DNA techniques and pharmacology, within the skill of the art. Such techniques are explained fully in the literature. See, e.g., T. E. Creighton, Proteins: Structures and Molecular Properties (W.H. Freeman and Company, 1993); Green & Sambrook et al., Molecular Cloning: A Laboratory Manual, 4th Edition (Cold Spring Harbor Laboratory Press, 2012); Colowick & Kaplan, Methods In Enzymology (Academic Press); Remington: The Science and Practice of Pharmacy, 22nd Edition (Pharmaceutical Press, 2012); Sundberg & Carey, Advanced Organic Chemistry: Parts A and B, 5th Edition (Springer, 2007).

### Example 1

[0685] To generate exosomes described herein, human embryonic kidney (HEK) cell line (HEK293SF) will be used. The cells will be stably transfected with Scaffold X and/or Scaffold Y linked to an agent of interest (e.g., antigen, adjuvant, or immune modulator). For example, CD40L-expressing exosomes can be generated by transfecting HEK293SF cells with CD40L-GFP PTGFRN fusion molecules, which express as a monomer or as a forced trimer.

[0686] Upon transfection, HEK293SF cells will be grown to high density in chemically defined medium for 7 days. Conditioned cell culture media will be then collected and centrifuged at 300-800×g for 5 minutes at room temperature to remove cells and large debris. Media supernatant will be supplemented with 1000 U/L BENZONASE® and incubated at 37° C. for 1 hour in a water bath. Supernatant will be collected and centrifuged at 16,000×g for 30 minutes at 4° C. to remove residual cell debris and other large contaminants. Supernatant will then be ultracentrifuged at 133,900×g for 3 hours at 4° C. to pellet the exosomes. Supernatant will be discarded and any residual media will be aspirated from the bottom of the tube. The pellet will be resuspended in 200-1000 μL PBS (—Ca —Mg).

[0687] To further enrich exosome populations, the pellet will be processed via density gradient purification (sucrose or OPTIPREP™).

[0688] The gradient will be spun at 200,000×g for 16 hours at 4° C. in a 12 mL Ultra-Clear (344059) tube placed in a SW 41 Ti rotor to separate the exosome fraction.

[0689] The exosome layer will then be gently removed from the top layer and diluted in ˜32.5 mL PBS in a 38.5 mL Ultra-Clear (344058) tube and ultracentrifuged again at 133,900×g for 3 hours at 4° C. to pellet the purified exosomes. The resulting pellet will be resuspended in a minimal volume of PBS (˜200 μL) and stored at 4° C.

[0690] For OPTIPREP™ gradient, a 3-tier sterile gradient will be prepared with equal volumes of 10%, 30%, and 45% OPTIPREP™ in a 12 mL Ultra-Clear (344059) tube for a SW 41 Ti rotor. The pellet will be added to the OPTIPREP™ gradient and ultracentrifuged at 200,000×g for 16 hours at 4° C. to separate the exosome fraction. The exosome layer will then be gently collected from the top ˜3 mL of the tube.

[0691] The exosome fraction will be diluted in −32 mL PBS in a 38.5 mL Ultra-Clear (344058) tube and ultracentrifuged at 133,900×g for 3 hours at 4° C. to pellet the purified exosomes. The pelleted exosomes will then be resuspended in a minimal volume of PBS (˜200 μL) and stored at 4° C. until ready to be used.

### Example 2

### In Vitro Analysis of KRAS mRNA and/or KRAS Protein Reduction

[0692] Exemplary ASOs disclosed herein were designed to specifically target KRAS transcript encoding the KRAS protein with a G12D mutation. See FIG. 1F. ASOs targeting any other target gene disclosed herein (e.g., NLRP3, STAT6, CEBP/β, STAT3, or NRAS) can also be used with similar methods. The disclosed ASOs will be tested for their ability to knockdown KRAS mRNA and/or KRAS protein expression in reporter cell lines containing the wild-type (WT) or G12D allele of human KRAS mRNA upstream of Renilla luciferase. To control for general cellular toxicity, the cell lines will also contain firefly luciferase. KRAS specific siRNA will be used as positive control.

[0693] Briefly, reporter cell lines expressing the WT or G12D mutant KRAS protein will be grown in cell culture media and seeded onto a 96 well plate. Then, the cells will be treated with different concentrations of EVs (e.g., exosomes) comprising one or more ASOs disclosed herein (“EV-ASO”). Approximately 3 days after EV-ASO treatment, the cells will be harvested and RNA and/or protein will be purified from the cells. Then, the KRAS mRNA and/or KRAS protein expression levels in the cells will be quantified using assays such as, qPCR and Western blot.

### Example 3

### In Vivo Analysis of KRAS mRNA/KRAS Protein Reduction

[0694] To evaluate the potency of EVs (e.g., exosomes) comprising one or more of the ASOs disclosed herein in reducing KRAS mRNA and/or KRAS protein level in vivo, a tumor mice model will be used. ASOs targeting any other target gene disclosed herein (e.g., NLRP3, STAT6, CEBP/β, STAT3, or NRAS) can also be used with similar methods. The ASOs disclosed herein will be administered to the tumor mice at various dosing regimens. The mice will be monitored for tumor growth periodically. The mice will eventually be sacrificed and the KRAS mRNA and/or KRAS protein levels will be assessed in various cells.

### Example 4

### In Vitro Analysis of NLRP3 mRNA and/or NLRP3 Protein Reduction

[0695] Exemplary ASOs disclosed herein were designed to specifically target NLRP3 transcript. See FIG. 1A. The disclosed ASOs will be tested for their ability to knockdown NLRP3 mRNA and/or NLRP3 protein expression in reporter cell lines containing a human NLRP3 coding sequence upstream of reporter. NLRP3-specific siRNA will be used as positive control.

[0696] Briefly, the reporter cell lines expressing NLRP3 will be grown in cell culture media and seeded onto a 96 well plate. Then, the cells will be treated with different concentrations of EVs (e.g., exosomes) comprising one or more ASOs disclosed herein (“EV-ASO”). Methods for producing such EVs are provided elsewhere in the present disclosure. Approximately 3 days after EV-ASO treatment, the cells will be harvested and RNA and/or protein will be purified from the cells. Then, the NLRP3 mRNA and/or NLRP3 protein expression levels in the cells will be quantified using assays such as, qPCR and Western blot.

### Example 5

### NLRP3 ASO Design

[0697] Mouse and human ASOs were designed to target NLRP3 (Gene ID No. 114548) expression. Target sequences were selected using the reference sequences NM_004895 for human NLRP3 and NM_145827.4 for mouse NLRP3. A list of possible ASOs were generated for each gene by tilling of ASOs across the entire length of the nascent transcript. ASOs having 15, 16, 17, 18, 19, or 20 nucleobases in length were generated.

[0698] ASOs were prioritized based on the following properties: must hit all splice forms; low self-dimerization energy (on-target activity); no GGGG motif (SEQ ID NO: 598) (can cause synthesis issues); less than 3 CpG dinucleotides in the oligo (potential immunostimulation); less than 8 bases of palindromic sequence (potential dimerization & immunostimulation); more than 2 mismatch and no more than 17 contiguous bases in an off-target hit to any gene, including known miRNA and lncRNA, and both nascent and mature transcripts; no overlap with repetitive sequences; and no overlap with SNPs of greater than or equal to 0.01 MAF in the general population. Additional criteria included Predicted species cross reactivity (e.g., human, cyno, rhesus, rat, mouse transcripts); and an off target (OT) filter less than or equal to 3 mismatch (mm) in mature transcripts, less than or equal to 3 mm in lnc transcripts, less than or equal to 3 mm in miRNAs, and less than or equal to 3 mm in nascent transcripts.

### Example 6

### In Vivo Analysis of NLRP3 mRNA/NLRP3 Protein Reduction

[0699] To evaluate the potency of EVs (e.g., exosomes) comprising one or more of the ASOs disclosed herein in reducing NLRP3 mRNA and/or NLRP3 protein level in vivo, a fibrosis mouse-model will be used. The ASOs disclosed herein will be administered to the mice at various dosing regimens. The mice will be monitored for symptoms of fibrosis. The mice will eventually be sacrificed and the NLRP3 mRNA and/or NLRP3 protein levels will be assessed in various cells.

### Example 7

### Functional Assay in Human Primary Monocytes and Macrophages

[0700] Activation of the NLRP3 pathway induces IL-1β production by human monocytes and macrophages. Activation of the NLRP3 pathway can be achieved by 3 hours priming with 200 ng/mL LPS followed by overnight incubation with 5 mM ATP, as demonstrated using monocytes isolated from human whole blood, as well as M0 macrophages that were matured in M-CSF for 6 days using the monocytes. The induction of IL-1β production can be inhibited by MCC950 and IC50 values of treatment with the free drug (FIGS. 2A-2B). IL-1β concentrations are determined using AlphaLISA assay.

[0701] Similar to IL-1β production by human cells following activation of the NLRP3 pathway, mouse bone marrow-derived macrophages also produce IL-1β which can be achieved by 3 hours priming with 200 ng/mL LPS followed by 3 hours incubation with 5 mM ATP (FIG. 2C).

### Example 8

### In Vivo Peritonitis Model

[0702] Intraperitoneal LPS challenge induces the production of IL-1β in mice, which can be detected in the systemic circulation 3 hours post-challenge. The induction of IL-1β in the serum of LPS-challenged mice can be inhibited by pre-treatment with MCC950 administered intraperitoneally, 1 hour prior to challenged (FIGS. 3A-3B).

### Example 9

### In Vitro Analysis of mRNA and/or Protein Reduction

[0703] Exemplary ASOs disclosed herein were designed to specifically target the STAT6 transcript (FIG. 1B) or the CEBP/β transcript (FIG. 1C). The disclosed ASOs will be tested for their ability to knockdown STAT6 or CEBP/β mRNA and/or STAT6 or CEBP/β protein expression in reporter cell lines containing a human STAT6 or CEBP/β coding sequence upstream of reporter. STAT6- or CEBP/β-specific siRNA will be used as positive control.

[0704] Briefly, the reporter cell lines expressing STAT6 or CEBP/β will be grown in cell culture media and seeded onto a 96 well plate. Then, the cells will be treated with different concentrations of EVs (e.g., exosomes) comprising one or more ASOs disclosed herein (“EV-ASO”). Methods for producing such EVs are provided elsewhere in the present disclosure. Approximately 3 days after EV-ASO treatment, the cells will be harvested and RNA and/or protein will be purified from the cells. Then, the STAT6 or CEBP/β mRNA and/or STAT6 or CEBP/p protein expression levels in the cells will be quantified using assays such as, qPCR and Western blot.

[0705] A lead ASO will be selected first by using in silico selection based on alternative transcript cross reactivity, species cross reactivity, specificity for gene of interest, presence of SNPs within ASO, length of ASO, location diversity, toxic motifs, and predicted binding affinity. Next, the ASOs will be screened for the ability to knock down (by at least 50% at 2 nM, and less than 20% knock down of GAPDH at 20 nM) target gene expression in cell lines transfected with the target sequence (STAT6 or CEBP/β mRNA). ASOs will then be assayed for target gene knock down potency in primary macrophages from at least two donors. Housekeeping gene expression stability, diversity of sequence location, and expression of predicted off-targets after treatment will also be observed. Optimal ASOs having the highest reprogramming activity (gene expression changes, cytokine production, T cell suppression) in primary macrophages will be selected as the lead ASOs.

### Example 10

### ASO Design

[0706] Mouse and human ASOs were designed to target STAT6 (Gene ID No. 6778) or CEBP/β (Gene ID No. 1051) expression. Target STAT6 sequences were selected using the reference sequences NM_001178078.2 for human STAT6 and NM_009284.2 for mouse STAT6. Target CEBP/β sequences were selected using the reference sequences NM_001285878.1 for human CEBP/β and NM_009883.4 for mouse CEBP/β. A list of possible ASOs were generated for each gene by tilling of ASOs across the entire length of the nascent transcript. ASOs having 15, 16, 17, 18, 19, or 20 nucleobases in length were generated.

[0707] ASOs were prioritized based on the following properties: must hit all splice forms; low self-dimerization energy (on-target activity); no GGGG motif (can cause synthesis issues); less than 3 CpG dinucleotides in the oligo (potential immunostimulation); less than 8 bases of palindromic sequence (potential dimerization & immunostimulation); more than 2 mismatch and no more than 17 contiguous bases in an off-target hit to any gene, including known miRNA and lncRNA, and both nascent and mature transcripts; no overlap with repetitive sequences; and no overlap with SNPs of greater than or equal to 0.01 MAF in the general population. Additional criteria included Predicted species cross reactivity (e.g., human, cyno, rhesus, rat, mouse transcripts); and an off target (OT) filter less than or equal to 3 mismatch (mm) in mature transcripts, less than or equal to 3 mm in lnc transcripts, less than or equal to 3 mm in miRNAs, and less than or equal to 3 mm in nascent transcripts.

### Example 11

### ASO Loading on Exosomes

[0708] Mice were treated intravenously with a single dose of 2E11 exosomes loaded with a reporter ASO (“exo ASO”) or with a single dose of free reporter ASO (“free ASO”). One hour following administration, increased exo ASO uptake was ubserved in CD11b⁺ dendritic cells, monocytes, and mMDSCs in the blood (FIG. 4A); Kupffer cells in the liver (FIG. 4B); red pulp macs, monocytes, and mMDSCs in the spleen (FIG. 4C); and dendritic cells and mMDSCs in tumor tissue (FIG. 4D), as evidenced by MFI, relative to the localization of free ASO. Uptake of exo ASO was also higher in bone marrow (FIGS. 4E-4F) as compared to uptake of free ASO and negative controls (FIGS. 4G-4J).

### Example 12

### Exo-STAT6-ASO and Exo-CEBP/β-ASO Are Capable of Repolarizing M2 Macrophages

[0709] Primary human macrophages were polarized with IL4/IL10/TGFβ treatment and treated with increasing concentrations of Exo-STAT6-ASO or Exo-CEBP/β-ASO. In vitro treatment of primary human macrophages with Exo-STAT6-ASO or Exo-CEBP/β-ASO induces dose-dependent knockdown of STAT6 (FIG. 5A) or CEBP/β (FIG. 5C), respectively, as well as the downregulation of an M2 macrophage gene, CD163 (FIGS. 5B and 5D). Potency was found to be slightly higher using the Exo-ASOs as compared to the free ASOs. In addition, various M2 genes were downregulated and various M1 genes were upregulated following treatment with Exo-STAT6-ASO or Exo-CEBP/β-ASO (FIGS. 6A-6J).

### Example 13

### Exo-STAT6-ASO and Exo-CEBP/β-ASO Target Gene Knockdown in CD11b Cells

[0710] In vivo, the primary recipient cell for Exo-STAT6-ASO and Exo-CEBP/β-ASO is CD11b cells. To further measure the uptake and known-down efficiency of the Exo-ASOs, mice were treated with Exo-STAT6-ASO or Exo-CEBP/β-ASO and sacrificed. CD11b⁺ cells were then isolated and enriched (FIGS. 7A-7F). Though not the endpoint, tumor volume was significantly lower in Exo-STAT6-ASO treated mice and Exo-CEBP/β-ASO treated mice relative to mice treated with a scramble Exo-ASO control, and mice treated with Exo-STAT6-ASO or Exo-CEBP/β-ASO tended to have smaller tumors than mice treated with STAT6 free ASO (FIG. 7G). Exo-ASO target gene knockdown was more pronounced in the CD11b-enriched cells than non-enriched cells following treatment with Exo-STAT6-ASO (FIG. 8A) or Exo-CEBP/β-ASO (FIG. 8B). In addition, both Exo-ASOs were effective at reducing Arg1 expression to a greater extent in CD11b-enriched cells than non-enriched cells (FIG. 8C).

[0711] CD11b-enriched cells treated with either Exo-STAT6-ASO or Exo-CEBP/β-ASO also showed macrophage reprogramming as evidenced by upregulation of various M1 genes and downregulation of various M2 genes (FIGS. 9A-9V).

### Example 14

### Treatment of Fibrosis Using Exo-STAT6-ASO and/or Exo-CEBP/β-ASO

[0712] Excessive M2 macrophage activation leads to the continuous production of TGFβ and growth factors that promote proliferation of myofibroblasts, activation of EMT/EndoMT, and extracellular matrix deposition. M2 macrophages represent a break point between wound healing and exacerbation of pro-fibrotic process. To test whether Exo-STAT6-ASO or Exo-CEBP/β-ASO could be used to treat fibrosis in a subject, primary human M2 macrophages were polarized with IL-13/TGFβ treatment, which are drivers of fibrosis. Cells were then exposed to increasing concentrations of free STAT6 ASO (FIGS. 10A and 10C), free CEBP/β ASO (FIGS. 10B and 10D), Exo-STAT6-ASO (FIGS. 10A and 10C), or Exo-CEBP/β-ASO (FIGS. 10B and 10D); and assayed for expression of the target gene (STAT6, FIG. 10A; CEBP/β, FIG. 10B) or expression of TGFβ1 (FIGS. 10C-10D).

[0713] To test the feasibility of Exo-ASO delivery in vivo using intra-nasal administration, 6-weak old mice were treated with bleomycin to induce pulmonary fibrosis. Two weeks later, mice were administered Exo-ASO-Cy5 intranasally, and the mice were sacrificed 4 hours post-administration. Bleomycin induced mice administered Exo-ASO-Cy5 showed increased total flux of Cy5 relative to naïve mice administered Exo-ASO-Cy5 (“IN naïve”) and relative to naïve and treated mice administered a PBS negative control (“−C”) (FIG. 11).

[0714] Exosome uptake was observed by lung macrophages and lung capillary endothelial cells in both normal lung and induced-pulmonary fibrosis lungs tissue (FIGS. 12A-12H and 13A-13H).

### Example 15

### Treatment of a Hepatocarcinoma Mouse-Model Using Exo-STAT6-ASO and/or Exo-CEBP/β-ASO

[0715] Hepa1-6 mice will be used to test the in vivo efficacy of Exo-STAT6-ASO and Exo-CEBP/β-ASO for treating a tumor. The Hepa1-6 line is an orthotopic mouse model of hepatocarcinoma. Samples were obtained from CRO and analyzed by in situ hybridization for expression of STAT6 and CEBP/β (FIGS. 14A-14F and 15A-15F).

### Example 16

### Analysis of STAT3 mRNA Expression

[0716] The ASOs of the present disclosure were tested for their ability to reduce STAT3 mRNA expression in IL-6 stimulated PANC-1 cells. The PANC-1 cells were grown in cell culture media and seeded onto a 96 well plate at a density of 20,000 cells/well. ASOs were tested in two separate cohorts: 2 doses or 5 doses were given to the PANC-1 cells (See TABLE 3) at final concentrations of 20 nM and 2 nM, respectively. The assay used Lipofectamine2000 transfection and a 48 hr treatment cycle, with incubation at 37° C. and 5% C02. Analysis of the mRNA expression was then carried out using a branched DNA assay.

TABLE 3

| | | | 5 point DR data | | | | | |
|---|---|---|---|---|---|---|---|---|
| | | | STAT3 | STAT3 | 2 point DR data | | | |
| | | | PANC1 | Max | STAT3 | STAT3 | GAPDH | |
| SEQ ID | starting | | IC50 | inihibition | Inhibition | Inhibition | Inhibition | |
| NO: | base | length | Prism | 24 nM | 20 nM | 2 nM | 20 nM | Notes |
| 103 | 1046 | 15 | 0.465 | 89.93 | 95.8 | 82.5 | 10.00 | 1 CpG, 7 × 1 mm, |
| | | | | | | | | 261 × 2 mm hits |
| 115 | 2267 | 15 | 0.796 | 78.99 | 90.8 | 65.2 | 3.00 | rat, 2 CpG, 3 × 1 mm, |
| | | | | | | | | 143 × 2 mm hits |
| 138 | 1238 | 16 | 1.306 | 85.33 | 86.8 | 53.0 | 9.00 | 2 CpG, 51 × 2 mm hits |
| 112 | 1482 | 16 | 1.041 | 86.32 | 91.0 | 70.0 | −25.00 | 1 CpG, 1 GGGG, |
| | | | | | | | | 90 × 2 mm hits |
| 105 | 450 | 20 | 1.471 | 85.61 | 91.6 | 79.4 | 13.00 | 1 CpG |
| 137 | 516 | 20 | 1.803 | 79.46 | 87.4 | 53.0 | −2.00 | 1 CpG |
| 124 | 995 | 20 | 1.597 | 86.46 | 83.3 | 62.6 | 13.00 | 1 CpG |
| 114 | 2262 | 20 | 0.814 | 84.94 | 87.0 | 66.4 | 10.00 | rat, 2 CpG |
| 102 | 2557 | 20 | 0.473 | 78.02 | 89.5 | 82.7 | 16.00 | 2 CpG, 1 GGGG |
| 107 | 2558 | 20 | 0.037 | 70.92 | 87.7 | 79.0 | 8.00 | 2 CpG, 1 GGGG |
| 116 | 411 | 20 | 1.854 | 69.78 | 85.5 | 64.5 | 16.00 | 1 CpG |
| 120 | 525 | 20 | 2.054 | 87.43 | 93.4 | 62.8 | 12.00 | 2 CpG |
| 130 | 458 | 20 | 1.677 | 72.16 | 80.7 | 59.3 | 13.00 | 1 CpG |
| 134 | 1039 | 20 | 2.127 | 77.94 | 82.8 | 54.3 | 10.00 | 1 CpG |
| 135 | 1238 | 20 | 1.046 | 78.59 | 84.2 | 53.9 | 4.00 | 2 CpG |
| 133 | 2274 | 20 | 2.243 | 81.73 | 90.7 | 55.9 | 14.00 | 1 CpG |
| 125 | 2263 | 20 | 2.296 | 81.67 | 85.1 | 61.7 | 14.00 | 2 CpG |
| 126 | 511 | 20 | 2.783 | 87.71 | 90.7 | 61.4 | 13.00 | 1 CpG |
| 131 | 894 | 17 | 2.825 | 75.20 | 90.7 | 58.9 | 12.00 | 2 CpG, 9 × 2 mm hits |
| 145 | 2273 | 20 | 3.063 | 85.73 | 89.2 | 50.2 | 17.00 | 1 CpG |
| 128 | 1043 | 20 | 3.565 | 79.56 | 81.1 | 61.1 | 19.00 | 1 CpG |
| 139 | 1034 | 20 | 4.023 | 72.50 | 83.4 | 52.8 | 10.00 | 1 CpG |
| Control | 1286 | 20 | 4.103 | 81.62 | 84.5 | 49.6 | 15.00 | no cyno, 9 × 2 mm hits |
| 142 | 1484 | 20 | 6.757 | 76.10 | 80.0 | 51.7 | 9.00 | 1 CpG, 1 GGGG |

### Example 17

### Analysis of NRas mRNA Expression

[0717] The ASOs of the present disclosure were tested for their ability to reduce NRas mRNA expression in HEK-293 cells. The HEK-293 cells were grown in cell culture media and seeded onto a 96 well plate at a density of 20,000 cells/well. ASOs were tested in two separate cohorts: 2 doses or 5 doses were given to the HEK-293 cells (See TABLES 4, 5 and 6) at final concentrations of 20 nM and 2 nM respectively. The assay used Lipofectamine2000 transfection and a 48 hr treatment cycle, with incubation at 37° C. and 5% C02. Analysis of the mRNA expression was then carried out using a branched DNA assay. For example, SEQ ID NO: 201 has shown a 98.45% NRas expression inhibition (TABLE 6).

TABLE 4
HEK293 cells: dual-dose

| SEQ ID | MV | SD | MV | |
|---|---|---|---|---|
| NO: | 20 nM | 20 nM | 2 nM | SD 2 nM |
| 201 | 3.5 | 0.4 | 5.8 | 2.3 |
| 274 | 9.6 | 2.5 | 18.6 | 10.2 |
| 239 | 7.8 | 0.7 | 17.9 | 2.2 |
| 200 | 2.8 | 1.0 | 7.8 | 3.1 |
| 272 | 8.7 | 0.6 | 16.5 | 5.4 |
| 264 | 10.4 | 1.1 | 24.7 | 4.3 |
| 232 | 4.4 | 1.3 | 9.8 | 2.2 |
| 281 | 16.2 | 3.4 | 26.4 | 4.1 |
| 248 | 6.0 | 1.4 | 21.8 | 6.1 |
| 252 | 8.3 | 1.4 | 15.2 | 3.9 |
| 254 | 5.8 | 1.1 | 15.6 | 4.6 |
| 236 | 9.8 | 2.1 | 19.4 | 2.6 |
| 273 | 8.1 | 1.0 | 24.3 | 5.2 |
| 257 | 8.6 | 3.7 | 25.9 | 2.8 |
| 227 | 11.2 | 1.3 | 25.1 | 4.3 |
| 218 | 10.7 | 0.4 | 19.1 | 3.6 |
| 253 | 6.5 | 1.0 | 11.6 | 2.0 |
| 206 | 8.7 | 2.6 | 20.2 | 5.7 |
| 231 | 6.4 | 1.3 | 20.2 | 3.9 |
| 247 | 9.8 | 2.0 | 21.3 | 12.5 |
| 223 | 18.7 | 1.1 | 23.9 | 3.3 |
| 238 | 7.6 | 1.9 | 28.8 | 1.9 |
| 250 | 8.6 | 2.1 | 27.3 | 2.7 |
| 224 | 14.4 | 3.8 | 39.6 | 4.7 |

TABLE 5
HEK293 cells: dose-response

| SEQ ID | IC20 | IC50 | IC80 | max. inhib. |
|---|---|---|---|---|
| NO: | [nM]: | [nM]: | [nM]: | [%]: |
| 200 | 0.041 | 0.160 | 0.666 | 97.6 |
| 201 | 0.024 | 0.100 | 0.455 | 97.2 |
| 254 | 0.067 | 0.336 | 2.109 | 93.4 |
| 232 | 0.048 | 0.245 | 1.589 | 93.2 |
| 248 | 0.051 | 0.288 | 2.401 | 91.0 |
| 206 | 0.117 | 0.471 | 2.584 | 90.9 |
| 231 | 0.180 | 0.538 | 2.096 | 90.4 |
| 253 | 0.108 | 0.461 | 2.788 | 90.4 |
| 239 | 0.027 | 0.159 | 1.463 | 90.4 |
| 238 | 0.139 | 0.646 | 4.794 | 88.9 |
| 272 | 0.034 | 0.166 | 1.294 | 88.9 |
| 247 | 0.122 | 0.561 | 4.144 | 88.8 |
| 264 | 0.039 | 0.229 | 2.434 | 88.5 |
| 252 | 0.072 | 0.296 | 1.951 | 88.4 |
| 218 | 0.139 | 0.427 | 1.944 | 88.0 |
| 236 | 0.053 | 0.349 | 4.780 | 87.3 |
| 257 | 0.069 | 0.364 | 3.671 | 87.3 |
| 274 | 0.019 | 0.131 | 2.077 | 86.8 |
| 250 | 0.173 | 0.715 | 5.683 | 86.3 |
| 227 | 0.087 | 0.413 | 4.046 | 86.3 |
| 281 | 0.061 | 0.263 | 2.224 | 86.2 |
| 185 | 0.074 | 0.349 | 3.802 | 85.4 |
| 223 | 0.121 | 0.581 | 35.387 | 80.8 |
| 224 | 0.639 | 1.931 | #N/A | 72.0 |

TABLE 6

| | | | | | 2D |
|---|---|---|---|---|---|
| | NRAS | GAPDH | | | GAPDH |
| SEQ ID | max | max | starting | | 20 nM |
| NO: | inhibition | inhibition | nucleotide | length | inhibition |
| 201 | 98.45 | 45.30 | 181 | 15 | 16.86 |
| 206 | 94.95 | 44.21 | 620 | 15 | 40.87 |
| 218 | 90.00 | 25.71 | 176 | 20 | 28.11 |
| 227 | 87.95 | 18.30 | 378 | 20 | 24.56 |
| 236* | 91.51 | 40.06 | 421 | 20 | 34.05 |
| 239 | 94.35 | 37.62 | 490 | 20 | 39.01 |
| 252 | 91.49 | 29.98 | 604 | 20 | 13.40 |
| 264 | 91.73 | 26.13 | 623 | 20 | 10.43 |
| 272 | 90.39 | 40.47 | 922 | 20 | 23.00 |
| 274 | 89.15 | 35.71 | 1074 | 20 | 24.93 |
| 231 | 93.63 | 29.21 | 399 | 20 | 36.92 |
| 223 | 85.75 | 18.44 | 325 | 20 | 20.53 |
| 247 | 90.09 | 25.35 | 534 | 20 | 25.39 |
| 257 | 91.79 | 30.55 | 615 | 20 | 21.09 |
| 238 | 90.92 | 26.33 | 429 | 20 | 22.48 |
| 253 | 94.40 | 29.34 | 611 | 20 | 40.44 |
| 250 | 88.02 | 33.44 | 537 | 20 | 27.30 |
| 200 | 98.68 | 38.68 | 180 | 15 | 33.52 |
| 232* | 95.91 | 53.16 | 400 | 20 | 36.10 |
| 281 | 90.44 | 50.48 | 1623 | 20 | 23.62 |
| 248 | 93.72 | 37.96 | 535 | 20 | 30.77 |
| 254 | 96.11 | 32.96 | 612 | 20 | 20.10 |
| 273 | 92.14 | 54.95 | 1072 | 20 | 26.53 |

### Example 18

### Construction of an Exosome

[0718] To generate exosomes described herein, human embryonic kidney (HEK) cell line (e.g., HEK293SF) will be used. The cells will be stably transfected with Scaffold X, Scaffold Y, and/or anchoring moiety linked to an agent of interest (e.g., antigen, adjuvant, or immune modulator). For example, CD40L-expressing exosomes can be generated by transfecting HEK293SF cells with CD40L-GFP PTGFRN fusion molecules, which express as a monomer or as a forced trimer.

[0719] Upon transfection, HEK cells will be grown to high density in chemically defined medium for 7 days. Conditioned cell culture media will be then collected and centrifuged at 300-800×g for 5 minutes at room temperature to remove cells and large debris. Media supernatant will be supplemented with 1000 U/L BENZONASE® and incubated at 37° C. for 1 hour in a water bath. Supernatant will be collected and centrifuged at 16,000×g for 30 minutes at 4° C. to remove residual cell debris and other large contaminants. Supernatant will then be ultracentrifuged at 133,900×g for 3 hours at 4° C. to pellet the exosomes. Supernatant will be discarded and any residual media will be aspirated from the bottom of the tube. The pellet will be resuspended in 200-1000 μL PBS (—Ca —Mg).

[0720] To further enrich exosome populations, the pellet will be processed via density gradient purification (sucrose or OPTIPREP™).

[0721] The gradient will be spun at 200,000×g for 16 hours at 4° C. in a 12 mL Ultra-Clear (344059) tube placed in a SW 41 Ti rotor to separate the exosome fraction.

[0722] The exosome layer will then be gently removed from the top layer and diluted in ˜32.5 mL PBS in a 38.5 mL Ultra-Clear (344058) tube and ultracentrifuged again at 133,900×g for 3 hours at 4° C. to pellet the purified exosomes. The resulting pellet will be resuspended in a minimal volume of PBS (˜200 μL) and stored at 4° C.

[0723] For OPTIPREP™ gradient, a 3-tier sterile gradient will be prepared with equal volumes of 10%, 30%, and 45% OPTIPREP™ in a 12 mL Ultra-Clear (344059) tube for a SW 41 Ti rotor. The pellet will be added to the OPTIPREP™ gradient and ultracentrifuged at 200,000×g for 16 hours at 4° C. to separate the exosome fraction. The exosome layer will then be gently collected from the top ˜3 mL of the tube.

[0724] The exosome fraction will be diluted in −32 mL PBS in a 38.5 mL Ultra-Clear (344058) tube and ultracentrifuged at 133,900×g for 3 hours at 4° C. to pellet the purified exosomes. The pelleted exosomes will then be resuspended in a minimal volume of PBS (˜200 μL) and stored at 4° C. until ready to be used.

### Example 19

### Effect of ASO Linker Structure on Potency and Amount Loaded in Engineered or Native Exosomes

[0725] The effect of ASO linker structure on amount of ASO loaded in engineered or native exosomes, as well as the effect of ASO linker structure on ASO potency were evaluated.

[0726] Loading effectiveness of a fixed ASO sequence conjugated to different linkers was evaluated in engineered exosomes. Exosomes over-expressing PTGFRN were produced in HEK293 cells and purified. ASO payloads were loaded on to the surface of exosomes by mixing. Accordingly, exosomes at a concentration of 1×10¹³ P/mL were mixed 1:1 with 100 uM ASO with sequence for firefly luciferase (FFLuc) that had been conjugated to different linker structures. The loading efficiency was calculated as the percentage of starting ASOs that became coupled to the exosomes. FIG. 25 shows the structures of the constructs used. Constructs C1 to C9 used a cholesterol-C6 lipid anchor. Constructs T1 to T9 used a cholesterol-TEG lipid anchor. Construct L1 used s tocopherol-C8 lipid anchors whereas constructs L2 and L3 used a tocopherol palitate-C6 lipid anchor. Other linker components indicated in FIG. 25 are: phosphodiester (PO), phosphothioate (PS), hexamethylene (C6), trimethylene (C3), triethylene glycol (TEG), and hexaethylene glycol (HEG). The results indicated that the mount of ASO molecules loaded per engineered exosome was affected by linker structure (FIG. 25). In general, loading efficiency was higher for constructs with the cholesterol-C6 anchor than for constructs with the cholesterol-TEG anchort. The highest loading efficacy, 68.78%, was observed for constructs with a tocopherol-C8 lipid anchor, corresponding to a load of 4,167 ASO units per exosome.

[0727] The loading effectiveness of the same fixed ASO sequence conjugated to different linkers evaluated in FIG. 25 using engineered exosomes was also evaluated using native exosomes. Native exosomes were produced in HEK293 cells and purified. Exosomes at a concentration of 1×10¹³ P/mL were mixed 1:1 with 100 uM ASO with a sequence for firefly luciferase that had been conjugated to different linker structures. The loading efficiency was calculate as the percentage of starting ASOs that became coupled to the exosomes. As in the case of engineered exosomes, the amount of ASO molecules loaded per native exosome was affected by linker structure (FIG. 26). Again, constructs with a cholesterol-C6 lipid anchor showed higher loading efficacy than constructs with a cholesterol-TEG lipid anchor. Loading efficacies over 90% were observed for constructs C2 and C3 (93.6% and 90.67%), corresponding to 5,616 and 5,440 ASO units per exosome, respectively. Thus, the maximum load efficacies and number of ASO per exosome were significantly higher in native exosomes than in engineered exosomes.

[0728] The activity of the constructs loaded onto native exosomes was also evaluated. Native exosomes were produced in HEK293 cells and purified. Exosomes at concentration of 1°10¹³ P/mL were mixed 1:1 with 100 uM ASO with a sequence for firefly luciferase conjugated to different linkers (see FIGS. 25 and 26). The in vitro potency of the exoASO constructs was evaluated in H1299 cells expressing firefly and Renilla luciferase. Potency was measured by the amount of luminescence remaining after incubation with the cells. Using T6 (boxed) as the reference, the data was normalized to the amount of ASO per sample as measured with Ribogreen. The potenty of C₁-C₉ constructs (FIG. 27A) and T1-T9 constructs (FIG. 27C) was higher than for L1-L3 constructs (FIG. 27B).

[0729] It is to be appreciated that the Detailed Description section, and not the Summary and Abstract sections, is intended to be used to interpret the claims. The Summary and Abstract sections may set forth one or more but not all exemplary aspects of the present disclosure as contemplated by the inventor(s), and thus, are not intended to limit the present disclosure and the appended claims in any way.

[0730] The present disclosure has been described above with the aid of functional building blocks illustrating the implementation of specified functions and relationships thereof. The boundaries of these functional building blocks have been arbitrarily defined herein for the convenience of the description. Alternate boundaries can be defined so long as the specified functions and relationships thereof are appropriately performed.

[0731] The foregoing description of the specific aspects will so fully reveal the general nature of the disclosure that others can, by applying knowledge within the skill of the art, readily modify and/or adapt for various applications such specific aspects, without undue experimentation, without departing from the general concept of the present disclosure. Therefore, such adaptations and modifications are intended to be within the meaning and range of equivalents of the disclosed aspects, based on the teaching and guidance presented herein. It is to be understood that the phraseology or terminology herein is for the purpose of description and not of limitation, such that the terminology or phraseology of the present specification is to be interpreted by the skilled artisan in light of the teachings and guidance.

[0732] The breadth and scope of the present disclosure should not be limited by any of the above-described exemplary aspects, but should be defined only in accordance with the following claims and their equivalents.

[0733] The contents of all cited references (including literature references, patents, patent applications, and websites) that may be cited throughout this application are hereby expressly incorporated by reference in their entirety for any purpose, as are the references cited therein.

What is claimed is:

1. An extracellular vesicle (EV) comprising a biologically active molecule (BAM) covalently linked to the EV via an anchoring moiety (AM), wherein the anchoring moiety comprises:
[AM]-[Linker]n-[BAM] Formula (I)
wherein n is any integer.

2. The extracellular vesicle of claim 1, wherein n is any number between 0 and 10.

3. The extracellular vesicle of claim 1 or 2, wherein the anchoring moiety comprises a sterol, GM1, a lipid, a vitamin, a small molecule, a peptide, or a combination thereof.

4. The extracellular vesicle of any one of claims 1 to 3, wherein the anchoring moiety comprises at least 6 carbon atoms, at least 7 carbon atoms, at least 8 carbon atoms, at least 9 carbon atoms, at least 10 carbon atoms, at least 11 carbon atoms, at least 12 carbon atoms, at least 13 carbon atoms, at least 14 carbon atoms, at least 15 carbon atoms, at least 16 carbon atoms, at least 17 carbon atoms, at least 18 carbon atoms, at least 19 carbon atoms, at least 20 carbon atoms, at least 25 carbon atoms, at least 30 carbon atoms, at least 35 carbon atoms, at least 40 carbon atoms, at least 45 carbon atoms, at least 50 carbon atoms, at least 55 carbon atoms, at least 60 carbon atoms, at least 65 carbon atoms, at least 70 carbon atoms, at least 75 carbon atoms, at least 80 carbon atoms, at least 85 carbon atoms, or at least 90 carbon atoms.

5. The extracellular vesicle of any one of claims 1 to 4, wherein the anchoring moiety comprises a sterol, a steroid, a hopanoid, a hydroxysteroid, a secosteroid, an analog thereof, or any combination thereof.

6. The extracellular vesicle of any one of claims 1 to 4, wherein the anchoring moiety comprises ergosterol, 7-dehydrocholesterol, cholesterol, 24S-hydroxycholesterol, lanosterol, cycloartenol, fucosterol, saringosterol, campesterol, β-sitosterol, sitostanol, coprostanol, avenasterol, stigmasterol, or any combination thereof.

7. The extracellular vesicle of claim 6, wherein the anchoring moiety is a cholesterol or derivative having a structure selected from the group consisting of

[chemical structure]

8. The extracellular vesicle of any one of claims 1 to 5, wherein the anchoring moiety comprises a steroid, which is dihydrotestosterone, uvaol, hecigenin, diosgenin, progesterone, cortisol, or any combination thereof.

9. The extracellular vesicle of any one of claims 1 to 4, wherein the anchoring moiety comprises a lipid.

10. The extracellular vesicle of claim 9, wherein the anchoring moiety comprises a C₂-C₆₀ chain.

11. The extracellular vesicle of claim 9, wherein the anchoring moiety comprises C₄-C₄₀, C₂-C₃₈, C₂-C₃₆, C₂-C₃₄, C₂-C₃₂, C₂-C₃₀, C₄-C₃₀, C₂-C₂₈, C₄-C₂₈, C₂-C₂₆, C₄-C₂₆, C₂-C₂₄, C₄-C₂₄, C₆-C₂₄, C₈-C₂₄, C₁₀-C₂₄, C₂-C₂₂, C₄-C₂₂, C₆-C₂₂, C₈-C₂₂, C₁₀-C₂₂, C₂-C₂₀, C₄-C₂₀, C₆-C₂₀, C₈-C₂₀, C₁₀-C₂₀, C₂-C₁₈, C₄-C₁₈, C₆-C₁₈, C₈-C₁₈, C₁₀-C₁₈, C₁₂-C₁₈, C₁₄-C₁₈, C₁₆-C₁₈, C₂-C₁₆, C₄-C₁₆, C₆-C₁₆, C₈-C₁₆, C₁₀-C₁₆, C₁₂-C₁₆, C₁₄-C₁₆, C₂-C₁₅, C₄-C₁₅, C₆-C₁₅, C₈-C₁₅, C₉-C₁₅, C₁₀-C₁₅, C₁₁-C₁₅, C₁₂-C₁₅, C₁₃-C₁₅, C₂-C₁₄, C₄-C₁₄, C₆-C₁₄, C₈-C₁₄, C₉-C₁₄, C₁₀-C₁₄, C₁₁-C₁₄, C₁₂-C₁₄, C₂-C₁₃, C₄-C₁₃, C₆-C₁₃, C₇-C₁₃, C₈-C₁₃, C₉-C₁₃, C₁₀-C₁₃, C₁₀-C₁₃, C₁₁-C₁₃, C₂-C₁₃, C₄-C₁₂, C₆-C₁₂, C₇-C₁₂, C₈-C₁₂, C₉-C₁₂, C₁₀-C₁₂, C₂-C₁₁, C₄-C₁₁, C₆-C₁₁, C₇-C₁₁, C₈-C₁₁, C₉-C₁₁, C₂-C₁₀, C₄-C₁₀, C₂-C₉, C₄-C₉, C₂-C₈, C₂-C₇, C₄-C₇, C₂-C₆, or C₄-C₆ chain.

12. The extracellular vesicle of any one of claims 9 to 11, wherein the anchoring moiety comprises a straight chain fatty acid, a branched fatty acid, an unsaturated fatty acid, a monounsaturated fatty acid, a polyunsaturated fatty acid, a hydroxyl fatty acid, a polycarboxylic acid, or any combination thereof.

13. The extracellular vesicle of claim 12, wherein the anchoring moiety comprises a straight chain fatty acid, which is butyric acid, caproic acid, caprylic acid, capric acid, lauric acid, myristic acid, palmitic acid, stearic acid, arachic acid, behenic acid, lignoceric acid, hexacosanoic acid, octacosanoic acid, triacontanoic acid and n-dotriacontanoic acid, and those having an odd number of carbon atoms, such as propionic acid, n-valeric acid, enanthic acid, pelargonic acid, hendecanoic acid, tridecanoic acid, pentadecanoic acid, heptadecanoic acid, nonadecanoic acid, heneicosanoic acid, tricosanoic acid, pentacosanoic acid, heptacosanoic acid, or any combination thereof.

14. The extracellular vesicle of claim 12, wherein the anchoring moiety comprises a branched fatty acid, which is isobutyric acid, isocaproic acid, isocaprylic acid, isocapric acid, isolauric acid, 11-methyldodecanoic acid, isomyristic acid, 13-methyl-tetradecanoic acid, isopalmitic acid, 15-methyl-hexadecanoic acid, isostearic acid, 17-methyloctadecanoic acid, isoarachic acid, 19-methyl-eicosanoic acid, α-ethyl-hexanoic acid, α-hexyldecanoic acid, α-heptylundecanoic acid, 2-decyltetradecanoic acid, 2-undecyltetradecanoic acid, 2-decylpentadecanoic acid, 2-undecylpentadecanoic acid, Fine oxocol 1800 acid (product of Nissan Chemical Industries, Ltd.), anteiso fatty acids terminating with an isobutyl group, such as 6-methyl-octanoic acid, 8-methyl-decanoic acid, 10-methyl-dodecanoic acid, 12-methyl-tetradecanoic acid, 14-methyl-hexadecanoic acid, 16-methyl-octadecanoic acid, 18-methyl-eicosanoic acid, 20-methyl-docosanoic acid, 22-methyl-tetracosanoic acid, 24-methyl-hexacosanoic acid, and 26-methyloctacosanoic acid, or any combination thereof.

15. The extracellular vesicle of claim 12, wherein the anchoring moiety comprises an unsaturated fatty acid, which is 4-decenoic acid, caproleic acid, 4-dodecenoic acid, 5-dodecenoic acid, lauroleic acid, 4-tetradecenoic acid, 5-tetradecenoic acid, 9-tetradecenoic acid, palmitoleic acid, 6-octadecenoic acid, oleic acid, 9-octadecenoic acid, 11-octadecenoic acid, 9-eicosenoic acid, cis-11-eicosenoic acid, cetoleic acid, 13-docosenoic acid, 15-tetracosenoic acid, 17-hexacosenoic acid, 6,9,12,15-hexadecatetraenoic acid, linoleic acid, linolenic acid, α-eleostearic acid, β-eleostearic acid, punicic acid, 6,9,12,15-octadecatetraenoic acid, parinaric acid, 5,8,11,14-eicosatetraenoic acid, 5,8,11,14,17-eicosapentaenoic acid, 7,10,13,16,19-docosapentaenoic acid, 4,7,10,13,16,19-docosahexaenoic acid, or any combination thereof.

16. The extracellular vesicle of claim 12, wherein the anchoring moiety comprises a hydroxy fatty acid, which is α-hydroxylauric acid, α-hydroxymyristic acid, α-hydroxypalmitic acid, α-hydroxystearic acid, ω-hydroxylauric acid, α-hydroxyarachic acid, 9-hydroxy-12-octadecenoic acid, ricinoleic acid, α-hydroxybehenic acid, 9-hydroxy-trans-10,12-octadecadienic acid, kamolenic acid, ipurolic acid, 9,10-dihydroxystearic acid, 12-hydroxystearic acid, or any combination thereof.

17. The extracellular vesicle of claim 12, wherein the anchoring moiety comprises a polycarboxylic acid, which is oxalic acid, malonic acid, succinic acid, glutaric acid, adipic acid, pimelic acid, suberic acid, azelaic acid, sebacic acid, D,L-malic acid, or any combination thereof.

18. The extracellular vesicle of any one of claims 1 to 4, wherein the anchoring moiety comprises a phospholipid.

19. The extracellular vesicle of claim 18, wherein the phospholipid is phosphatidyl choline, phosphatidyl ethanolamine, phosphatidyl glycerol, phosphatidyl serine, phosphatidic acid, 2 lysophosphatidyl choline, sphingomyelin, or any combination thereof.

20. The extracellular vesicle of claim 18, wherein the phospholipid is phosphatidylethanolamines, which is dilauroylphosphatidyl ethanolamine, dimyristoylphosphatidyl ethanolamine, dipalmitoylphosphatidyl ethanolamine, distearoylphosphatidyl ethanolamine, dioleoylphosphatidyl ethanolamine, 1-palmitoyl-2-oleylphosphatidyl ethanolamine, 1-oleyl-2-palmitoylphosphatidyl ethanolamine, dierucoylphosphatidyl ethanolamine, or any combination thereof.

21. The extracellular vesicle of claim 18, wherein the phospholipid is phosphatidyl glycerol, which is dilauroylphosphatidyl glycerol, dimyristoylphosphatidyl glycerol, dipalmitoylphosphatidyl glycerol, distearoylphosphatidyl glycerol, dioleoylphosphatidyl glycerol, 1-palmitoyl-2-oleyl-phosphatidyl glycerol, 1-oleyl-2-palmitoyl-phosphatidyl glycerol, dierucoylphosphatidyl glycerol, or any combination thereof.

22. The extracellular vesicle of claim 18, wherein the phospholipid is phosphatidyl serine, which is dilauroylphosphatidyl serine, dimyristoylphosphatidyl serine, dipalmitoylphosphatidyl serine, distearoylphosphatidyl serine, dioleoylphosphatidyl serine, 1-palmitoyl-2-oleyl-phosphatidyl serine, 1-oleyl-2-palmitoyl-phosphatidyl serine, dierucoylphosphatidyl serine, or any combination thereof.

23. The extracellular vesicle of claim 18, wherein the phospholipid is phosphatidic acid, which is dilauroylphosphatidic acid, dimyristoylphosphatidic acid, dipalmitoylphosphatidic acid, distearoylphosphatidic acid, dioleoylphosphatidic acid, 1-palmitoyl-2-oleylphosphatidic acid, 1-oleyl-2-palmitoyl-phosphatidic acid, dierucoylphosphatidic acid, or any combination thereof.

24. The extracellular vesicle of claim 18, wherein the phospholipid is phosphatidyl inositol, which is dilauroylphosphatidyl inositol, dimyristoylphosphatidyl inositol, dipalmitoylphosphatidyl inositol, distearoylphosphatidyl inositol, dioleoylphosphatidyl inositol, 1-palmitoyl-2-oleyl-phosphatidyl inositol, 1-oleyl-2-palmitoyl-phosphatidyl inositol, dierucoylphosphatidyl inositol, or any combination thereof.

25. The extracellular vesicle of claim 18, wherein the phospholipid is a symmetric phospholipid, which is 1,2 dipropionyl sn-glycero 3 phosphocholine (03:0 PC); 1,2 dibutyryl sn glycero 3 phosphocholine (04:0 PC); 1,2 dipentanoyl sn glycero 3 phosphocholine (05:0 PC); 1,2 dihexanoyl sn glycero 3 phosphocholine (06:0 PC), 1,2 diheptanoyl sn glycero 3 phosphocholine (07:0 PC); 1,2 dioctanoyl sn glycero 3 phosphocholine (08:0 PC); 1,2 dinonanoyl sn glycero 3 phosphocholine (09:0 PC); 1,2 didecanoyl sn glycero 3 phosphocholine (10:0 PC); 1,2 diundecanoyl sn glycero 3 phosphocholine (11:0 PC, DUPC); 1,2 dilauroyl sn glycero 3 phosphocholine (12:0 PC); 1,2 ditridecanoyl sn glycero 3 phosphocholine (13:0 PC); 1,2 dimyristoyl sn glycero 3 phosphocholine (14:0 PC, DMPC); 1,2 dipentadecanoyl sn glycero 3 phosphocholine (15:0 PC; 1,2 dipalmitoyl sn glycero 3 phosphocholine (16:0 PC, DPPCQ 1,2 diphytanoyl sn glycero 3 phosphocholine (4ME 16:0 PC); 1,2 diheptadecanoyl sn glycero 3 phosphocholine (17:0 PC); 1,2 distearoyl sn glycero 3 phosphocholine (18:0 PC, DSPC); 1,2 dinonadecanoyl sn glycero 3 phosphocholine (19:0 PC); 1,2 diarachidoyl sn glycero 3 phosphocholine (20:0 PC); 1,2 dihenarachidoyl sn glycero 3 phosphocholine (21:0 PC); 1,2 dibehenoyl sn glycero 3 phosphocholine (22:0 PC); 1,2 ditricosanoyl sn glycero 3 phosphocholine (23:0 PC); 1,2 dilignoceroyl sn glycero 3 phosphocholine (24:0 PC); 1,2 dimyristoleoyl sn glycero 3 phosphocholine (14:1 (Δ9-Cis) PC); 1,2 dimyristelaidoyl sn glycero 3 phosphocholine (14:1 (Δ9-Trans) PC); 1,2 dipalmitoleoyl sn glycero 3 phosphocholine (16:1 (Δ9-Cis) PC); 1,2 dipalmitelaidoyl sn glycero 3 phosphocholine (16:1 (Δ9-Trans) PC); 1,2 dipetroselenoyl sn glycero 3 phosphocholine (18:1 (Δ6-Cis) PC); 1,2 dioleoyl sn glycero 3 phosphocholine (18:1 (Δ9-Cis) PC, DOPC); 1,2 dielaidoyl sn glycero 3 phosphocholine (18:1 (Δ9-Trans) PC); 1,2 dilinoleoyl sn glycero 3 phosphocholine (18:2 (Cis) PC, DLPC); 1,2 dilinolenoyl sn glycero 3 phosphocholine (18:3 (Cis) PC, DLnPC); 1,2 dieicosenoyl sn glycero 3 phosphocholine (20:1 (Cis) PC); 1,2 diarachidonoyl sn glycero 3 phosphocholine (20:4 (Cis) PC, DAPC); 1,2 dierucoyl sn glycero 3 phosphocholine (22:1 (Cis) PC); 1,2 didocosahexaenoyl sn glycero 3 phosphocholine (22:6 (Cis) PC, DHAPC); 1,2 dinervonoyl sn glycero 3 phosphocholine (24:1 (Cis) PC); 1,2 dihexanoyl sn glycero 3 phosphoethanolamine (06:0 PE); 1,2 dioctanoyl sn glycero 3 phosphoethanolamine (08:0 PE); 1,2 didecanoyl sn glycero 3 phosphoethanolamine (10:0 PE); 1,2 dilauroyl sn glycero 3 phosphoethanolamine (12:0 PE), 1,2 dimyristoyl sn glycero 3 phosphoethanolamine (14:0 PE); 1,2 dipentadecanoyl sn glycero 3 phosphoethanolamine (15:0 PE); 1,2 dipalmitoyl sn glycero 3 phosphoethanolamine (16:0 PE); 1,2 diphytanoyl sn glycero 3 phosphoethanolamine (4ME 16:0 PE); 1,2 diheptadecanoyl sn glycero 3 phosphoethanolamine (17:0 PE); 1,2 distearoyl sn glycero 3 phosphoethanolamine (18:0 PE, DSPE); 1,2 dipalmitoleoyl sn glycero 3 phosphoethanolamine (16:1 PE); 1,2 dioleoyl sn glycero 3 phosphoethanolamine (18:1 (Δ9-Cis) PE, DOPE); 1,2 dielaidoyl sn glycero 3 phosphoethanolamine (18:1 (Δ9-Trans) PE); 1,2 dilinoleoyl sn glycero 3 phosphoethanolamine (18:2 PE, DLPE); 1,2 dilinolenoyl sn glycero 3 phosphoethanolamine (18:3 PE, DLnPE); 1,2 diarachidonoyl sn glycero 3 phosphoethanolamine (20:4 PE, DAPE); 1,2 didocosahexaenoyl sn glycero 3 phosphoethanolamine (22:6 PE, DHAPE); 1,2 di O octadecenyl sn glycero 3 phosphocholine (18:0 Diether PC); 1,2 dioleoyl sn glycero 3 phospho rac (1 glycerol) sodium salt (DOPG), or any combination thereof.

26. The extracellular vesicle of claim 18, wherein the phospholipid is a asymmetric phospholipid, which is 1 myristoyl 2 palmitoyl sn glycero 3 phosphocholine (14:0-16:0 PC, MPPC); 1 myristoyl 2 stearoyl sn glycero 3 phosphocholine (14:0-18:0 PC, MSPC); 1 palmitoyl 2 acetyl sn glycero 3 phosphocholine (16:0-02:0 PC); 1 palmitoyl 2 myristoyl sn glycero 3 phosphocholine (16:0-14:0 PC, PMPC); 1 palmitoyl 2 stearoyl sn glycero 3 phosphocholine (16:0-18:0 PC, PSPC); 1 palmitoyl 2 oleoyl sn glycero 3 phosphocholine (16:0-18:1 PC, POPC); 1 palmitoyl 2 linoleoyl sn glycero 3 phosphocholine (16:0-18:2 PC, PLPC); 1 palmitoyl 2 arachidonoyl sn glycero 3 phosphocholine (16:0-20:4 PC); 1 palmitoyl 2 docosahexaenoyl sn glycero 3 phosphocholine (14:0-22:6 PC); 1 stearoyl 2 myristoyl sn glycero 3 phosphocholine (18:0-14:0 PC, SMPC); 1 stearoyl 2 palmitoyl sn glycero 3 phosphocholine (18:0-16:0 PC, SPPC); 1 stearoyl 2 oleoyl sn glycero 3 phosphocholine (18:0-18:1 PC, SOPC); 1 stearoyl 2 linoleoyl sn glycero 3 phosphocholine (18:0-18:2 PC); 1 stearoyl 2 arachidonoyl sn glycero 3 phosphocholine (18:0-20:4 PC); 1 stearoyl 2 docosahexaenoyl sn glycero 3 phosphocholine (18:0-22:6 PC); 1 oleoyl 2 myristoyl sn glycero 3 phosphocholine (18:1-14:0 PC, OMPC); 1 oleoyl 2 palmitoyl sn glycero 3 phosphocholine (18:1-16:0 PC, OPPC); 1 oleoyl 2 stearoyl sn glycero 3 phosphocholine (18:1-18:0 PC, OSPC); 1 palmitoyl 2 oleoyl sn glycero 3 phosphoethanolamine (16:0-18:1 PE, POPE); 1 palmitoyl 2 linoleoyl sn glycero 3 phosphoethanolamine (16:0-18:2 PE); 1 palmitoyl 2 arachidonoyl sn glycero 3 phosphoethanolamine (16:0-20:4 PE); 1 palmitoyl 2 docosahexaenoyl sn glycero 3 phosphoethanolamine (16:0-22:6 PE); 1 stearoyl 2 oleoyl sn glycero 3 phosphoethanolamine (18:0-18:1 PE); 1 stearoyl 2 linoleoyl sn glycero 3 phosphoethanolamine (18:0-18:2 PE); 1 stearoyl 2 arachidonoyl sn glycero 3 phosphoethanolamine (18:0-20:4 PE); 1 stearoyl 2 docosahexaenoyl sn glycero 3 phosphoethanolamine (18:0-22:6 PE); 1 oleoyl 2 cholesterylhemisuccinoyl sn glycero 3 phosphocholine (OChemsPC), or any combination thereof.

27. The extracellular vesicle of claim 8, wherein the phospholipid is a lysolipid.

28. The extracellular vesicle of claim 27, wherein the phospholipid is a lysoglycerophospholipid, a lysoglycosphingoliopid, a lysophosphatidylcholine, a lysophosphatidylethanolamine, a lysophosphatidylinositol, a lysophosphatidylserine, or any combination thereof.

29. The extracellular vesicle of claim 27, wherein the phospholipid is 1 hexanoyl 2 hydroxy sn glycero 3 phosphocholine (06:0 Lyso PC); 1 heptanoyl 2 hydroxy sn glycero 3 phosphocholine (07:0 Lyso PC); 1 octanoyl 2 hydroxy sn glycero 3 phosphocholine (08:0 Lyso PC); 1 nonanoyl 2 hydroxy sn glycero 3 phosphocholine (09:0 Lyso PC); 1 decanoyl 2 hydroxy sn glycero 3 phosphocholine (10:0 Lyso PC); 1 undecanoyl 2 hydroxy sn glycero 3 phosphocholine (11:0 Lyso PC); 1 lauroyl 2 hydroxy sn glycero 3 phosphocholine (12:0 Lyso PC); 1 tridecanoyl 2 hydroxy sn glycero 3 phosphocholine (13:0 Lyso PC); 1 myristoyl 2 hydroxy sn glycero 3 phosphocholine (14:0 Lyso PC); 1 pentadecanoyl 2 hydroxy sn glycero 3 phosphocholine (15:0 Lyso PC); 1 palmitoyl 2 hydroxy sn glycero 3 phosphocholine (16:0 Lyso PC); 1 heptadecanoyl 2 hydroxy sn glycero 3 phosphocholine (17:0 Lyso PC); 1 stearoyl 2 hydroxy sn glycero 3 phosphocholine (18:0 Lyso PC); 1 oleoyl 2 hydroxy sn glycero 3 phosphocholine (18:1 Lyso PC); 1 nonadecanoyl 2 hydroxy sn glycero 3 phosphocholine (19:0 Lyso PC); 1 arachidoyl 2 hydroxy sn glycero 3 phosphocholine (20:0 Lyso PC); 1 behenoyl 2 hydroxy sn glycero 3 phosphocholine (22:0 Lyso PC); 1 lignoceroyl 2 hydroxy sn glycero 3 phosphocholine (24:0 Lyso PC); 1 hexacosanoyl 2 hydroxy sn glycero 3 phosphocholine (26:0 Lyso PC); 1 myristoyl 2 hydroxy sn glycero 3 phosphoethanolamine (14:0 Lyso PE); 1 palmitoyl 2 hydroxy sn glycero 3 phosphoethanolamine (16:0 Lyso PE); 1 stearoyl 2 hydroxy sn glycero 3 phosphoethanolamine (18:0 Lyso PE); 1 oleoyl 2 hydroxy sn glycero 3 phosphoethanolamine (18:1 Lyso PE); 1 hexadecyl sn glycero 3 phosphocholine (C16 Lyso PC); or any combination thereof.

30. The extracellular vesicle of any one of claims 1 to 5, wherein the anchoring moiety comprises a vitamin.

31. The extracellular vesicle of any one of claims 1 to 5, wherein the anchoring moiety comprises vitamin D, vitamin K, vitamin E, or any combination thereof.

32. The extracellular vesicle of any one of claims 1 to 31, wherein the anchoring moiety further comprises a linker between the biologically active molecule and the anchoring moiety.

33. The extracellular vesicle of claim 32, wherein the linker comprises a non-cleavable linker.

34. The extracellular vesicle of claim 33, wherein the non-cleavable linker comprises polyethylene glycol (PEG), glycerol, alkyl, succinimide, maleimide, or any combination thereof.

35. The extracellular vesicle of claim 33, wherein the non-cleavable linker comprises polyethylene glycol (PEG) characterized by a formula R3-(O—CH₂—CH₂)ₙ— or R3-(0-CH₂—CH₂)ₙ—O—, wherein R³ being hydrogen, methyl or ethyl and n is an integer between 2 and 200.

36. The extracellular vesicle of claim 33, wherein the non-cleavable linker comprises diethylene glycol, triethylene glycol, tetraethylene glycol (TEG), hexaethylene glycol (HEG), pentaethylene glycol, or any combination thereof.

37. The extracellular vesicle of any one of claims 32 to 34, wherein the linker comprises a polyglycerol (PG) having the formula ((R3-O—(CH₂—CHOH—CH₂O)ₙ—), wherein R³ is hydrogen, methyl or ethyl, and n is an integer between 3 and 200.

38. The extracellular vesicle of any one of claims 32 to 34, wherein the linker comprises a diglycerol, triglycerol, tetraglycerol (TG), pentaglycerol, a hexaglycerol (HG), or any combination thereof.

39. The extracellular vesicle of any one of claims 32 to 34, wherein the linker comprises alkyl.

40. The extracellular vesicle of any one of claims 32 to 34, wherein the linker comprises alkenyl, alkynyl, arylalkyl, arylalkenyl, arylalkynyl, heteroarylalkyl, heteroarylalkenyl, heteroarylalkynyl, heterocyclylalkyl, heterocyclylalkenyl, heterocyclylalkynyl, Aryl, heteroaryl, heterocyclyl, cycloalkyl, cycloalkenyl, alkylarylalkyl, alkylarylalkenyl, alkylarylalkynyl, alkenylarylalkyl, alkenyl Reyl alkenyl, alkenyl aryl alkynyl, alkynyl aryl alkyl, alkynyl aryl alkenyl, alkynyl aryl alkynyl, alkyl heteroaryl alkyl, alkyl heteroaryl alkyl, alkyl heteroaryl alkenyl, alkyl heteroaryl alkynyl, alkenyl heteroaryl alkyl, alkenyl heteroaryl alkenyl, alkenyl heteroaryl alkynyl, alkynyl Heteroarylalkyl, alkynylheteroarylalkenyl, alkynylheteroarylalkynyl, alkylheterocyclylalkyl, alkylheterocyclylalkenyl, alkylheterocyclylalkynyl, alkenylheterocyclylalkyl, alkenylheterocyclylalkenyl, alkenylheterocyclylalkynyl, or any combination thereof.

41. The extracellular vesicle of claim 32, wherein the linker comprises a cleavable linker.

42. The extracellular vesicle of claim 41, wherein the cleavable linker is a redox cleavable linker, a reactive oxygen species cleavable linker, a pH dependent cleavable linker, an enzymatic cleavable linker, a protease cleavable linker, an esterase cleavable linker, a phosphatase cleavable linker, a photoactivated cleavable linker, a self-immolative linker, or any combination thereof.

43. The extracellular vesicle of claim 41, wherein the cleavable linker is a self-immolative linker.

44. The extracellular vesicle of claim 41, wherein the cleavable linker is a cinnamyl group, a naphthyl group, a biphenyl group, a heterocyclic ring, a homoaromatic group, coumarin, furan, thiophene, thiazole, oxazole, isoxazole, pyrrole, pyrazole, pyridine, imidazone, triazole, or any combination thereof.

45. The extracellular vesicle of any one of claims 41 to 44, wherein the linker has the formula:
-Aₐ-Y_{y}-
wherein each -A- is independently an amino acid unit, a is independently an integer from 1 to 12; -Y- is a spacer unit, and y is 0, 1, or 2.

46. The extracellular vesicle of claim 45, wherein -Aₐ- is a dipeptide, a tripeptide, a tetrapeptide, a pentapeptide, or a hexapeptide.

47. The extracellular vesicle of claim 46, wherein a is 2 and -Aₐ- is selected from the group consisting of valine-alanine, valine-citrulline, phenylalanine-lysine, N-methylvaline-citrulline, cyclohexylalanine-lysine, and beta-alanine-lysine.

48. The extracellular vesicle of claim 46, wherein said -Aₐ- is valine-alanine or valine-citrulline.

49. The extracellular vesicle of any one of claims 45 to 48, wherein y is 1.

50. The extracellular vesicle of any one of claims 45 to 49, wherein -Y- is a self-immolative spacer.

51. The extracellular vesicle of claim 50, wherein -Y_{y}- has the formula (V): [chemical structure]
wherein each R² is independently C₁₋₈ alkyl, —O—(C₁₋₈ alkyl), halogen, nitro, or cyano; and m is an integer from 0 to 4.

52. The extracellular vesicle of claim 51, wherein m is 0, 1, or 2.

53. The extracellular vesicle of claim 51, wherein m is 0.

54. The extracellular vesicle of any one of claims 45 to 53, wherein the cleavable linker is valine-alanine-p-aminobenzylcarbamate or valine-citrulline-p-aminobenzylcarbamate.

55. The extracellular vesicle of any one of claims 45 to 49, wherein -Y- is a non self-immolative spacer.

56. The extracellular vesicle of claim 55, wherein the non self-immolative spacer is -Gly- or -Gly-Gly-.

57. The extracellular vesicle of any one of claims 1 to 4, wherein the anchoring moiety comprises:

[chemical structure]

58. The extracellular vesicle of any one of claims 1 to 5, which comprises (i) an anchoring moiety selected from the group consisting of SEQ ID NOS: 301-334 and 401-567, and (ii) a linker selected from the linker combinations of TABLE 1 or TABLE 2.

59. The extracellular vesicle of any one of claims 1 to 5, wherein the anchoring moiety comprises a scaffold protein.

60. The extracellular vesicle of any one of claims 1 to 59, further comprising a scaffold moiety.

61. The extracellular vesicle of claim 59 or 60, wherein the anchoring moiety and/or the scaffold moiety is scaffold X.

62. The extracellular vesicle of claim 61, wherein the Scaffold X is selected from the group consisting of prostaglandin F2 receptor negative regulator (the PTGFRN protein); basigin (the BSG protein); immunoglobulin superfamily member 2 (the IGSF2 protein); immunoglobulin superfamily member 3 (the IGSF3 protein); immunoglobulin superfamily member 8 (the IGSF8 protein); integrin beta-1 (the ITGB1 protein); integrin alpha-4 (the ITGA4 protein); 4F2 cell-surface antigen heavy chain (the SLC3A2 protein); a class of ATP transporter proteins (the ATP1A1, ATP1A2, ATP1A3, ATP1A4, ATP1B3, ATP2B1, ATP2B2, ATP2B3, ATP2B4 proteins); a functional fragment thereof, and any combination thereof.

63. The extracellular vesicle of claim 61, wherein the Scaffold X is PTGFRN protein or a functional fragment thereof.

64. The extracellular vesicle of claim 61, wherein the Scaffold X comprises an amino acid sequence as set forth in SEQ ID NO:302.

65. The extracellular vesicle of claim 61, wherein the Scaffold X comprises an amino acid sequence at least 50%, at least 60%, at least 70%, at least 80%, at least 85%, at least 90%, at least 95%, at least 96%, at least 97%, at least 98%, at least 99%, or about 100% identical to SEQ ID NO:302.

66. The extracellular vesicle of claim 59 or 60, wherein the anchoring moiety and/or the scaffold moiety is scaffold Y.

67. The extracellular vesicle of claim 66, wherein the Scaffold Y is a scaffold protein that is capable of anchoring the biologically active molecule on the luminal surface of the extracellular vesicle and/or on the exterior surface of the extracellular vesicle.

68. The extracellular vesicle of claim 66 or 67, wherein the Scaffold Y is selected from the group consisting of myristoylated alanine rich Protein Kinase C substrate (the MARCKS protein), myristoylated alanine rich Protein Kinase C substrate like 1 (the MARCKSL1 protein), brain acid soluble protein 1 (the BASP1 protein), a functional fragment thereof, and any combination thereof.

69. The extracellular vesicle of any one of claims 66 to 68, wherein the Scaffold Y is a BASP1 protein or a functional fragment thereof.

70. The extracellular vesicle of any one of claims 66 to 69, wherein the Scaffold Y comprises an N terminus domain (ND) and an effector domain (ED), wherein the ND and/or the ED are associated with the luminal surface of the EV.

71. The extracellular vesicle of claim 70, wherein the ND is associated with the luminal surface of the exosome via myristoylation.

72. The extracellular vesicle of claim 70 or 71, wherein the ED is associated with the luminal surface of the exosome by an ionic interaction.

73. The extracellular vesicle of any one of claims 70 to 72, wherein the ED comprises (i) a basic amino acid or (ii) two or more basic amino acids in sequence, wherein the basic amino acid is selected from the group consisting of Lys, Arg, His, and any combination thereof.

74. The extracellular vesicle of claim 73, wherein the basic amino acid is (Lys)n, wherein n is an integer between 1 and 10.

75. The extracellular vesicle of any one of claims 70 to 74, wherein the ED comprises Lys (K), KK, KKK, KKKK (SEQ ID NO: 405), KKKKK (SEQ ID NO: 406), Arg (R), RR, RRR, RRRR (SEQ ID NO: 407); RRRRR (SEQ ID NO: 408), KR, RK, KKR, KRK, RKK, KRR, RRK, (K/R)(K/R)(K/R)(K/R) (SEQ ID NO: XX), (K/R)(K/R)(K/R)(K/R)(K/R) (SEQ ID NO: XX), or any combination thereof.

76. The extracellular vesicle of any one of claims 70 to 75, wherein the ND comprises the amino acid sequence as set forth in G:X2:X3:X4:X5:X6, wherein G represents Gly; wherein “:” represents a peptide bond, wherein each of the X2 to the X6 is independently an amino acid, and wherein the X6 comprises a basic amino acid.

77. The extracellular vesicle of claim 76, wherein:
(i) the X2 is selected from the group consisting of Pro, Gly, Ala, and Ser;
(ii) the X4 is selected from the group consisting of Pro, Gly, Ala, Ser, Val, Ile, Leu, Phe, Trp, Tyr, Gln and Met;
(iii) the X5 is selected from the group consisting of Pro, Gly, Ala, and Ser;
(iv) the X6 is selected from the group consisting of Lys, Arg, and His; or
(v) any combination of (i)-(iv).

78. The extracellular vesicle of any one of claims 70 to 77, wherein the ND comprises the amino acid sequence of G:X2:X3:X4:X5:X6, wherein
(i) G represents Gly;
(ii) “:” represents a peptide bond;
(iii) the X2 is an amino acid selected from the group consisting of Pro, Gly, Ala, and Ser;
(iv) the X3 is an amino acid;
(v) the X4 is an amino acid selected from the group consisting of Pro, Gly, Ala, Ser, Val, Ile, Leu, Phe, Trp, Tyr, Gln and Met;
(vi) the X5 is an amino acid selected from the group consisting of Pro, Gly, Ala, and Ser; and
(vii) the X6 is an amino acid selected from the group consisting of Lys, Arg, and His.

79. The extracellular vesicle of any one of claims 76 to 78, wherein the X3 is selected from the group consisting of Asn, Gln, Ser, Thr, Asp, Glu, Lys, His, and Arg.

80. The extracellular vesicle of any one of claims 70 to 79, wherein the ND and the ED are joined by a linker.

81. The extracellular vesicle of claim 80, wherein the linker comprises one or more amino acids.

82. The method of any one of claims 70 to 81, wherein the ND comprises an amino acid sequence selected from the group consisting of (i) GGKLSKK (SEQ ID NO: 411), (ii) GAKLSKK (SEQ ID NO: 412), (iii) GGKQSKK (SEQ ID NO: 413), (iv) GGKLAKK (SEQ ID NO: 414), (v) GGKLSK (SEQ ID NO: 415), or (vi) any combination thereof.

83. The extracellular vesicle of claim 82, wherein the ND comprises an amino acid sequence selected from the group consisting of (i) GGKLSKKK (SEQ ID NO: 438), (ii) GGKLSKKS (SEQ ID NO: 439), (iii) GAKLSKKK (SEQ ID NO: 440), (iv) GAKLSKKS (SEQ ID NO: 441), (v) GGKQSKKK (SEQ ID NO: 442), (vi) GGKQSKKS (SEQ ID NO: 443), (vii) GGKLAKKK (SEQ ID NO: 444), (viii) GGKLAKKS (SEQ ID NO: 445), and (ix) any combination thereof.

84. The extracellular vesicle of any one of claims 70 to 83, wherein the ND comprises the amino acid sequence GGKLSKK (SEQ ID NO: 411).

85. The extracellular vesicle of any one of claims 70 to 84, wherein the Scaffold Y is at least about 8, at least about 9, at least about 10, at least about 11, at least about 12, at least about 13, at least about 14, at least about 15, at least about 16, at least about 17, at least about 18, at least about 19, at least about 20, at least about 21, at least about 22, at least about 23, at least about 24, at least about 25, at least about 30, at least about 35, at least about 40, at least about 45, at least about 50, at least about 55, at least about 60, at least about 65, at least about 70, at least about 75, at least about 80, at least about 85, at least about 90, at least about 95, at least about 100, at least about 105, at least about 110, at least about 120, at least about 130, at least about 140, at least about 150, at least about 160, at least about 170, at least about 180, at least about 190, or at least about 200 amino acids in length.

86. The extracellular vesicle of any one of claims 70 to 85, wherein the Scaffold Y comprises (i) GGKLSKKKKGYNVN (SEQ ID NO: 446), (ii) GAKLSKKKKGYNVN (SEQ ID NO: 447), (iii) GGKQSKKKKGYNVN (SEQ ID NO: 448), (iv) GGKLAKKKKGYNVN (SEQ ID NO: 449), (v) GGKLSKKKKGYSGG (SEQ ID NO: 450), (vi) GGKLSKKKKGSGGS (SEQ ID NO: 451), (vii) GGKLSKKKKSGGSG (SEQ ID NO: 452), (viii) GGKLSKKKSGGSGG (SEQ ID NO: 453), (ix) GGKLSKKSGGSGGS (SEQ ID NO: 454), (x) GGKLSKSGGSGGSV (SEQ ID NO: 455), or (xi) GAKKSKKRFSFKKS (SEQ ID NO: 456).

87. The extracellular vesicle of any one of claims 70 to 85, wherein the Scaffold Y consists of (i) GGKLSKKKKGYNVN (SEQ ID NO: 446), (ii) GAKLSKKKKGYNVN (SEQ ID NO: 447), (iii) GGKQSKKKKGYNVN (SEQ ID NO: 448), (iv) GGKLAKKKKGYNVN (SEQ ID NO: 449), (v) GGKLSKKKKGYSGG (SEQ ID NO: 450), (vi) GGKLSKKKKGSGGS (SEQ ID NO: 451), (vii) GGKLSKKKKSGGSG (SEQ ID NO: 452), (viii) GGKLSKKKSGGSGG (SEQ ID NO: 453), (ix) GGKLSKKSGGSGGS (SEQ ID NO: 454), (x) GGKLSKSGGSGGSV (SEQ ID NO: 455), or (xi) GAKKSKKRFSFKKS (SEQ ID NO: 456).

88. The extracellular vesicle of any one of claim 70 to 87, wherein the Scaffold Y does not comprise Met at the N terminus.

89. The extracellular vesicle of any one of claims 70 to 88, wherein the Scaffold Y comprises a myristoylated amino acid residue at the N terminus of the scaffold protein.

90. The extracellular vesicle of claim 89, wherein the amino acid residue at the N terminus of the Scaffold Y is Gly.

91. The extracellular vesicle of any one of claims 1 to 90, wherein the biologically active molecule is linked to the anchoring moiety and/or the scaffold moiety on the exterior surface of the EV.

92. The extracellular vesicle of any one of claims 1 to 90, wherein the biologically active molecule is linked to the anchoring moiety and/or the scaffold moiety on the luminal surface of the EV.

93. The extracellular vesicle of any one of claims 1 to 92, wherein the biologically active molecule is a polypeptide, a peptide, a polynucleotide (DNA and/or RNA), a chemical compound, or any combination thereof.

94. The extracellular vesicle of claim 93, wherein the biologically active molecule is a chemical compound.

95. The extracellular vesicle of claim 94, wherein the chemical compound is a small molecule.

96. The extracellular vesicle of any one of claims 1 to 95, wherein the biologically active molecule comprises an antisense oligonucleotide (ASO), a siRNA, a miRNA, a shRNA, a nucleic acid, or any combination thereof.

97. The extracellular vesicle of any one of claims 1 to 96, wherein the biologically active molecule comprises a peptide, a protein, an antibody or an antigen binding fragment thereof, or any combination thereof.

98. The extracellular vesicle of claim 97, wherein the antigen binding fragment thereof comprises scFv, (scFv)2, Fab, Fab′, F(ab′)2, F(ab1)2, Fv, dAb, and Fd fragment, diabodys, antibody-related polypeptide, or any fragment thereof.

99. The extracellular vesicle of claim 96, wherein the biologically active molecule comprises an ASO.

100. The extracellular vesicle of claim 99, wherein the ASO targets a transcript.

101. The extracellular vesicle of claim 100, wherein the transcript is a STAT6 transcript, a CEBP/β transcript, a STAT3 transcript, a KRAS transcript, a NRAS transcript, an NLPR3 transcript, a PMP22 transcript, or any combination thereof.

102. The extracellular vesicle of claim 101, wherein the STAT6 transcript comprises SEQ ID NO: 13.

103. The extracellular vesicle of claim 102, wherein the ASO comprises a sequence selected from the group consisting of SEQ ID NO: 601 to SEQ ID NO: 703.

104. The extracellular vesicle of claim 101, wherein the CEBP/β transcript comprises SEQ ID NO: 23.

105. The extracellular vesicle of claim 104, wherein the ASO comprises a sequence selected from the group consisting of SEQ ID NO: 704 to SEQ ID NO: 806.

106. The extracellular vesicle of claim 101, wherein the STAT3 transcript comprises SEQ ID NO: 43.

107. The extracellular vesicle of claim 106, wherein the ASO comprises a sequence selected from the group consisting of SEQ ID NO: 889 to SEQ ID NO: 988.

108. The extracellular vesicle of claim 101, wherein the NRAS transcript comprises SEQ ID NO: 53.

109. The extracellular vesicle of claim 108, wherein the ASO comprises a sequence selected from the group consisting of SEQ ID NO: 989 to SEQ ID NO: 1088.

110. The extracellular vesicle of claim 101, wherein the NLPR3 transcript comprises SEQ ID NO: 3.

111. The extracellular vesicle of claim 110, wherein the ASO comprises a sequence selected from the group consisting of SEQ ID NO: 101 to SEQ ID NO: 200.

112. The extracellular vesicle of claim 101, wherein the KRAS transcript is a KRAS mutant transcript.

113. The extracellular vesicle of claim 101, wherein the KRAS mutant is KRAS G12D.

114. The extracellular vesicle of claim 112, wherein the KRAS transcript comprises SEQ ID NO: 32.

115. The extracellular vesicle of claim 114, wherein the ASO comprises a sequence selected from the group consisting of SEQ ID NO: 807 to SEQ ID NO: 888.

116. The extracellular vesicle of claim 101, wherein the PMP22 transcript comprises SEQ ID NO: 58.

117. The extracellular vesicle of claim 116, wherein the ASO comprises a sequence selected from the group consisting of SEQ ID NOS: 62-95 and 201-270.

118. The extracellular vesicle of any one of claims 1 to 117, wherein the EV is an exosome.

119. A pharmaceutical composition comprising the extracellular vesicle of any one of claims 1 to 118 and a pharmaceutically acceptable carrier.

120. A method of conjugating a biologically active molecule to an EV, comprising linking an anchoring moiety to the EV.

121. A kit comprising the EV of any one of claim 1 to 118 and instructions for use.

122. A kit comprising reagents to conjugate a biologically active molecule to an EV, and instructions to conduct the conjugation, thereby making the EV of any one of claims 1 to 118.

123. A method of treating or preventing a disease or disorder in a subject in need thereof comprising administering the EV of any one of claims 1 to 118 to the subject.

124. The method of claim 121, wherein the disease or disorder is a cancer, an inflammatory disorder, a neurodegenerative disorder, a central nervous diseases, or a metabolic disease.

125. The method of claim 121 or 122, wherein the EV is administered intravenously, intraperitoneally, nasally, orally, intramuscularly, subcutaneously, parenterally, or intratumorally.

The application's sequence listing, which the Patent Office published only in electronic form, follows.

SEQUENCE LISTING (1088 sequences)

SEQ ID NO: 1 - DNA, 32739 bp, Artificial Sequence
  Synthetic
ttttttaaaattaagaaaaggaatcaatttaattaaataccaaaaagttttacatattcctgaattttcaaccagctacaaaaagcatggatttttcttattagaaaacaaaactgttacaaaaaatttaaataaataaatagctgccataaaatttcaacataatatatagtcaactagttctgtgttatggtcagttaatagaaagatagcgggaatgatgatatgagcaaaagtaaacagaacaaagaagaaaaaagataggaaaaagaaagttagacagagaagagaaaaataaagaaagtgctttattgaatgagctaattacatgaggtcaccaagaggaacatcctctaactgaggcgctgtgatgacaacaacacccgatgctgtcattgtcctggtgtcttcctcaccctggcgtaaaggagatgcccaagctctgcacaggaaggcatcgtcggcaagctctcttctccgacactccaccggaaggatcacagagctgtggtcttggcctggatggatcgcagctctctccacctgagggcccccagctggagggaccggagaacactggcgtctggcagccccgtttccactcctaccaagaaggctcaaagacgacggtcagctcaggcttttcttcttgaagtgtttctaacgcactttttgtctcataattgaaatacatttcagacaacctgtaaaagcaaatagaaagcctgggttgcactcttcagataactctgtcagagtcgttaaccttaaaagtctcatctcttcatttccctaaactccacacacttctaaaatgtaaaaaaaaaaaaaaaaaaaaaagagggaccacaactcccagagtgctccgcgtcctcgccgccgtcgccgccgccgagaccaagatggccgcgagactccgcaccttcttcaagaatgcctgggccaaggagccggtgctcgtcgtgtccttcgtcactgggagcctcagacccccaggaccccagcctggagtggctgaagaaactgtgagcacctccaatgacagaggaggcccctcccacggctcccaataaaaatgtggggaaaaaaaaaaaaaagctctaagtgcccaatgtggttcctgttatatttttaactatctagttgggaaaatgttaagcatacataaaagtatagaaaatagtataatgaaccccctgtgtccattacccaagttcgacaattaaacaggtcatgtcaacttgtttcttctattgcccacccactcctcccacccatggattattttaaatactgcatttaatgcatctatcaataattcactttgtgacactaaaatataattacaatgtcactatcacaccaaaatcgtttaacaataatttcttagtatcactgtatgtccagtcagcatttacgcttcctcaactgtcttgtaaatttttttaccttatgttcatttagtcactaacctgatcaattctacacattgcatttgcccaggatgcctctcacatcttcgatgtaagttcttcctcctctttaataaagtttcccttgcaacttaactaataaatccacccatttgtcctgcaccatttataaccatctcaatttggtggtgttatatactgaatgtttgtcttccttaacaattcccatgatgaagcccgaacccctaatgtacggtacttaaaggtgaggcccttgggaagtagttagagttagatgaagttgtgagggtggggccctcagtatggggtgagtgcccttacaggagagatatcagagagtttgttctttctcccctgtcttctctcccttgcctcccctccctccatgcaatcacataacaagaaggtagccatctgcaaatcaggaagaggactctcgccagcaaccaaattcatcagagacttgattttggactttctagcctccagtattgtgagataataaatctgtgtttgagtcacacagtctaaagcagcttgttatcgcagcctgagaaaacgggttgattgcattcatggattcttcaatctattttgagcctgtccctcagcctgggtccagaatgtccctcagggctaggtcagtgatgctacatgtagcagtgtccccagctttgacctgaccaatcctttgtttgttcccccatctctcttagctctgggaatattggcttgtcctgcagcaaatgtgctccattatgttggcacaaggatgcaaggctgattcaaacttgtatttattcaaacctgcattccaacaagttctcagccttgagatcattaatatggacagaagtccctggactaatggaatttatattttgggagcagagatagataataaataaacaagaaaatgacatagcacataagatgtgctacactgcagaggagaatgagaagagaagaaaaagtgcttctattttcagtagaatagtcaaagacagcctcgcagagaagacctttaagcagagaatttaggaaggtacagggaataatgcaggtggatactgaaggggagagagttctaggccagaagaaaagcaagtgcaaaaatccagagatgacagtgttcttgcaaaacagcaaggagatcactgtactggggcagaataagcaagggttgggagaagcggaatcttcggaagcaggagaggctggattatgtggggcatggaagccaccatgagtttgttgctctgattatgaaagtgataagaagacgatgttgacaagagtgatatgatgcgagttacgttttagctgaatcccttgtctgctaaaatcagaataacagatgcagggtgacctgtcagaatgccaccatgacaatccagacaccaggtgatggtggcttgagccaaggaagaagccgtgaagctggcctgaagtggtcagggagtggccaagctgggaaggcagagctcacaggatgtgctgacacattggacatgattataaggaaaaagagacagtgacgacagaaccagaaatgttttggcccgagcaacttggaggaagtgaccatcgactgaaatggggaagaatcaggtttcgggtagaagagagtagcaagggtgtggatctagatgtgacgtttgagaggtttattaaaccttcaagaagaaagatcagccaagcacggagacacagaatttatggacatataatctggaggccacagcacacatatcatgaagccagaagaccagataatttaaatgagggagaaagtgtagggaagaaaaattagcccagcgactaagctctgaggattcaacacataagggtcaggatgatgaagaagaggccagaaaggagactgagtagaaggatctgatgaaataggagaaaacccaggagagcatgttggccttaaagccaagcagtgaaaacgtcttcagggaaaagtgcaatcatcacggctgacagaaccgtgggactcgccaggaagctcttgctagagaggagacgactacctcagtagtatcacagaggtgggctggcaatatcctgacacactgtcgaatttcgtgtaatttcccatcttgctattcctggagcactcttttcccatttagaaatcctcagaaaccgccaggcacggaggctcacacctgtaatcccagcacttggggaggccgaggcaggcagatcacgaggtcaggagatggagaccatcctggctaacacagtgaaaccccaactctactaaaaatacaaaaaattagccgggtgtggtggcaggcgcctgtggtcccagctacttgggaggccgaggcaggagaatggcgtgaacccgggaggcggagcttgcagtgagccgagatcatgccactgcactccagcctgggcgacagagcaagactctgtctcaaggaaaaaaaaaataaatcctcagaaacaaaacaacaagatccccactatgtaaagacccttccaatttggatgacccatagacgagttctacgaagttcggttccttgtgtagaacagaatcctccttggccatgatcgcatgagggcttgtgtttctttggggaatgtgggtgaaatccagcttagccttggtgattctaaccatctcagtgaagtggaatgtgtagtttaaccccatattctctattttaaaatatccaccacaactgacccaggcccaacctaatcttgagtggctgcaaatgaagcgagagccatcctggattttgataacagtcaacgtttcctgagaactcagagtcccaccacgggcatctctgcagagcacactcaccccaggttctgcaggaggcagctctgctgtttcagcacttcacagaacatcatgacccccaggtcgcccaggtcattgttgcccaggctcagctttcgcaggctctggctggaggtcagaagtgtggaaagatcccagcagcagtgtgacgtgaggttgcagttgtctaatctgcaaaaagggggtgatttaaagaaaatgtccccttaaccatccccctagctccccaagattttagcatcttagcctgtcttgtttcaggtggaaaaaaaaaaagcacaggagcacaggactaactagcttcaagcagccttgtatgctggtaattattcttctctctctttttcaaatccactgcattgcacagatcaaattagtaacagtggtttgttcattgatttaccaaattctgtgcctttccctacatttccataaaatgtaagtgtcatactgccctccttgttttgtggtacagaaaactgtgatggtaaggactcaagttcctacatctatatcatctggaaggactcctcccagtcccatgatcctgtaacaaggcaaacactaagaagacacctcacttctaagatacagattatcttgtggccactctgcctaaacgtccctccacccttggccaccatgtgttctcattgctgtaataaaccaaaggacttactccaacacctgaagcttgcagtcggggtgcaagagtccctcacagagtagtttgatccccttgtctccgagagtgttgcctcgcaggtaaaggtgcgtgagattctgattagtgctgagtaccgaggacaaagctgaacaacagactgacgtaaggccagaattcaccaacctgtagaaggacagggagaagagtcctcagtacccagctgttccccaacattgtgcagctgctttgactcagtgcctcgtcctctctcagcagctgcagccttcagctcagagagcaggagccagcatctcagatatgatctggggagagcaagacctgctgtctctggctgtcacaggagacacaaatgatgtctcagcagatgctttgctgtatgagtccgacagaaagagccaaggcaaactgagccagttaccccatactcctcctcctcctcacacagctttcctccggccaggagtgctcctcagcaccacttcttccagaaacacatcccagtggttatcctcaactaataatccccgtaacactgcagacacccacactgcaggggcctttttttttttttttaagagagacaggaaaaaaaaatcctcctcatgggaagtcggtgctgatttaaacatcaaagacaacaggtgaacgtccattgtgaccttctaagctgtagctagggctgtgacaggaacacggcggggcccttagcaattgccacctcccgccttcctgcgcccccaaatgcccctttcacatctttctcgctgcagccctcaaccacgttggagaggtgggaggatcgcttgagtccaggaagtcgaggctgcagtgagccatgattgcgctgccacactctagcctgggtgacagagtgagaccctgcctaaataaataaataaataaggccaggtgcagtggcttatgcctgtaatcccagcactttgggaggtccagcactttgggagggtggatcacgaggtcaggagttcaaaaccagcctggccaacatggtgaaagcccatctctactaaaaatataaaaattagttagggtggtggtgggcacctgtaatcccagctacttgggaggctgaggcaggagaattgcttgaacctgggaggcagaggttgcagtgagccgagattgccactgcacttcaacctgggcaacaaagtgagactctgtctcaaaaataaataaataaatagaaaaagccaggctcttgctcagtcacccaggccaagtgcacagctcactgcagtcttaaactcctgggctcagacaatccacccaccttggcctcccaaagtgctgggattacaggcatgagccactgtgcctgacccagagaccagtcttatttgattattatatcaacctggcaaggaaggagtgcagctaaaactattacatacattttacatattagaaatctaaggcttataaaaattacatgtttctctcaaggccacagagcaggtgtgtggtggggagggatccagacctggactttccaccttttagtctcatcttctccccactgccctttctgtccacctctctcttccttctgcacagcaaaaggccttttagagcataaaaccccaaaaatgcatcaatctcgatggaattaagagttttgatgtactattcttgagtcaaattaagcccattctatcacccaggaagagcataagagctctaaaatcactggtggcgtaattcctaggagcacagatgcttctattccatgaagccaggaatagcgcaggtgattgcctccttcctgccagagtccttggcaatggcatgttttttaagctctttggtgtctacgaggcaggaaaaatagaaatacagaaaaagtgtattcagacagtaaagcatgaacagatgaccagcaggaaaaagtgattatccatccactggtttctatcttcccaattaaggaagagtcaaactgaaaagacacagtaagtaagactaataggcaaatgaagcccaagagagacagacaaaaacaaagcaagttttgagtggcttctactaagctctcatccccggtaagaattctatcagagggttgttgttaattaacatgcagaagggattagtagcattcctggcaaaggccagggacattctagtagaatggggatggtcttcaaagaggaaaagagaaaatattttttaaattatgtaattaaagttatgcaggctttaccactatttccaaaaaggagtagaatggattattcaacagatgtttggggagcactacacagtagtagtagaaattgcaacagacggtgcagttttgttaagaaaacgtcatatccaaattgtgaaaatgctggtaactattaagcaacggttacactgaacacataataaaatgtttaaagaatcaaacaaccatgtcccaccaaccaatccttggattagaggaatgtgattgacatctcgatttcaaccaatccacctaactgagctctacatttaccaagcacggatatcttgccatgtactgtattaagttaattggttggggatttttatttattaactacctgcctatgtcacaaaactgtctcataatgaaaactgaatcccagtgctttgggaggccaaggtgggaggaccacttgaggccaggagtttgagaccagcctgggcaacatagcaagaccctgtctctacataaaaaattttaaacattttaaacattacccaggcatggtagtacacacctgtagtcctagctagtcagaaggctgaggcaggaagattgcttgagcccaggagagttcaaggctacagtgagctatgatcctaccactgcactccagtctgagccacagagcaaaaccctgtcttaaaaaaagaaaagaaaagaaaggaaaataaggaaaggaaaggggaaagggaaaggggggggggaggggaagggaagggagaaagagaaagaaagaaagagagagagagagaaagaaagaaagaaagagaaaaagaaaaagagagaaagaaaggaggaggaggaagaaggaaggaaggaaggaaggaatctgaagaagaagatcaaacattttttgagtatttattgtgtgcttgacatggatgacgactttaaacagggttatctcattgaatgatcacaacctcaagatgggaatgttagttttatccctgcttttaaatggacaaaatgaggatcacagtaattaaaaaataagtaggagcttcttagatggatagtagaaagtgggaaagtgggggtaaccttccaggcaaaaggaaaagagtagcaagaataaggaagattaaaagaaccaccaagatgtttcaaaactaattcatagctgggcacagtgatgtccacctatagtcccagctacttgggcggctgagacgggaggattgcttgagcccaggagtgcagatgagatcaggcactctgggtggtatggctgtagatgaacccaggaattcaaattcagcctgagcatcatagcaagtccccatctctaaaacagcaaaacaaaactcatccaatatgactcaaaatggagtgcaaggtatggcaggagagagggcagtatcagggacagccttgtgtgccaagctaagatgtcactctgactgcagagaagaacttttgaagatttttgaacaaagggtcaatattttcaaatttgcatcttaaaaagttccctctggtgtagtgatgagtggtagagggaaccgaaagcagagcatttaggaccgtcccccgtttactcactcagcagcctcctggaaagccccactattcaatgaggcaggaggaagagggcaggagcaggtcagagaacgggggtggaaggtggggtatgataattaaaccaatgttgcaaatgctcagcatgtgtgacccttgagcagtattgagacaggcagtacacaatatgcagccagagatgaggacccaaagttcgagagaaaaaaatgtagctatacctaacacataggctatacctaacacataggctatacctaacacgtaggctatacctaacccataggctatacctaacacacaggctatgcctaacccataggctatacctaacacacagccacatgtatggctgtacctaacacataaaatgcataaaagtctcgactgattaatgccacttatagatacctatctcaaagcaaatacacatgcataaaactatatatacaaatgtgctttttgcagagttgtttgtaatagtggaaaagaacagttatcccaaaatgcatgatttgattaaataaattatggtaaagcacactatgggatattatgccccaatcgatagatctacacaaatcagcatggaaatttatccatgataaatgaaaaaaggatatcacagaaaaatatttatattatggttctagtttcaatagatagggtgttatggattgaattgtttcctctaagactttatatgtggaagtcctaggccccagtacttcagattgtgaccttatttggtgatacggttactgaaaatgtaattagttaagatcaggtcgttacaaatctaacatgacttgtgttctttcacagggaaacttgggacatggagaaagacacacacagacacagggaagacaccacgtagagataaaggcaatggtgtggcagaggcatctacaggtcaaggaatggcaaaatgtgtcagcaagatgacattccaccagaagccaaagagaagcatgaacagattccccacagccctcagaaggacccagcctgctagcatcttaatctcacacttctggcctccagaactgagggacaataaatttctgttgtttaagctgctctgtttgtgatactttattacagtagctctaacagactaggcatttaaaatactacataacaatgtattacaaatgcaacatgaaaatcacataggtcttcattcacattactgatataaataccacccagatcagcatatacaggaaatccatttgtccataattagcaaccaatatatgttcacaaagctctgatactcccttggatggattgatggatggatggatggatggatggatggatggatggatggattgacggatggaaaatagagggatggatgatggatggatggatggatggacagatgaatggattatataacaatctattgtattaaaaaaagtctggatggttgttcatcagactattgtaaatggctctctcagaagagggctgagaaggagctttcactttccactttgtctgtactatgatatgtttacaccaagcatgtgttacttttctaataaaaagtttgtgaatgatatctgggtttgagacctactgttgttgaaattgagaggtatatgagaattctcagggagtttagaaatatttagtaacaacaacaacaaaaaaggtaaaccaggcgggtgtgtggctcacgcctgtaatcccaacactttgggaggccaaggcaggcagatcacctgaggtcagaaattcgagaccagcctggcaaacatggtgaaaccccgtatctactaaaaatacaaaaattagccaggcatggcagtgcacacctgtagtccctgctactcagaaggctgaggcagaagaattgttggaacccgggaggcagaggttgcagtgagccaagattgcgccactgcattttagcctgggtgacagagtaagactccaactcaaaaaaaaaaaaaaaaaaaaaaacacaactaaaccagtcgtgaaatccccagaccacaggaagagaagccaatgcaggatccagggagggggaagctataacattagcaggaaagactaagtagtgacctaaaaataagagcgaagaaggcttccaaagaggaagagtgaaatgaattaaaggcagcagatgtcaactaaagtaaggactgggaaggacctgtacgacctataaggacccagcctgctgatgcctcagtctcagactttggcctcctgaactgagaggcaataaactcttgttgtttaggccgctctgtttgtgatactttattacagcagctctaccaggttaggtattgacaatagtaactacatagagcatattacagatgcatcaggcacatttgtaattggcttgtttgtcatgtggaatttggaaccaggatcactgagagtcacctgagtgcctacgcctgggcctcttcggttccatctgctttgcctggagggctcttccggctccttcacagcccatcccacgcttcactgagcacctgctccaatgtcacccgctcggagaggcactcgccaaacgtgagcagagaagcacccctcgccgtcactccagtttttcttatagctcttatacacagggtatattgtttagcatgtctattatctgttatcacttccctaaaagaacggttgtgaaaacaggattttggtctgttttactcactgctgctgtcagtgcccaccacagagcccccagagggcctgcaaaatgaagggacaaaatcatgtctgttgaacaaacttagagaagcagaagtcaaattgccaaggaagagtaatattctaaggcgatttgctaaggaagggtaataccctaaggcgaggaaatgaaggcactgcaggaagacttcatagaaagagatatggtcacatctgaggattggctgatgggagaggtccaaggaagtatcagagctttgtgaacagaggttggttgttaattatggattagtggattactcctctgggaagacctttcctgccaaattttgtcttgaatgctgatctggctggtatatatattaataatgtgaatgaatgaagacctatccaatttgcttattgtatttgtagatattattgtcagaatgaagattcaaaactgcctagtcaatgggtcaaaagacaggtaagatgaggtttagcaaagctaaattggaggtcccacccttaagctgagagccagatgaagaagccctgtagagagcccattagcaacatctcctaaggcaatgcactgggaattaaggcagtggcttgggaggtcacagacgtttgtctacactgagttccactaccttctctctgagtgtccttggacaaagttatgaggctccctgaattttattttctcctctttaaattggagacacagataccctaccctatagcatctttctgaagccaactgagaaaatccatgtaagaacatgaaagagcaggtgatacagggaaagtgatacaggaaagtggtacagggaaagtgcatgattattagtgggtattccctactactgtttactgcagaattccaacatgaatcaaaaggcttatgtaactgccaaaaaaaacaaggaaatcagagattccaccagtgaaaccatagttctctgcaacaggaggtaaaacatccaccatgcatcatcaggtctgggcaccacatttcaaagacagacactaacaaaccagcctgtgtacctgggagagcatggctacataggtgaaggtgctgagccatgacactgttgaggatatagaggctgcagtgtaagagtcctctcctagtgtagaggctgcagggtgagagctctttcctagtgtagaggctgcatgcactatgcgataacttgcatgcttgcaagcatgcacacataaaatgggtgactattcatgtgagtgtcttggaagcaagtttttccctcaacaggcaattgggctgcaccatctctaaggtttcttccaacactaagaaactctagttctataatcataaattagcataaattatcttattagcagcagtatacattatatgcctccagtccttcaaagcatttctgatgtttttacctccttactctaccttcagctctgcctgaccaaagtaacccccatccacattttccaaataattcacctctgaaaagaagttacttttctggtaagacacccatgaagacttaccccagtttctgcaggttacactgtggattcttggctttttcacataaaattgcgactcctgagtctcccaaggcattctcccccacatagagtctggtcagggaatggctggtgctcaatactgatgcaagatcctgacaacatgctgatgtgaggcagcagctgaccaaccttccatagagatggcagaatgtcagtcatgtctctcacccacgctccaccatggacaaggaagcacccgtacctgccactgcctctactccagtttacacatggaaagggagtggacacaagctctatgtacacttctgatttccttttccatttggtggaataacaagtaagcattctccaagctcccaccaatactacatcttcccagctccctacattcagctttattgtggtaaaatacgtgtaaaataaaatttaccattttaaccatttttaagtgcacaattaatggccttaagcacttcacattgttgtgcaaccatcaccaccaccatctccagaactcctttcatcttgcagaactgaaactccataaccattaaacaatgtcttcccactctccgccctcccattgcctgcaaccacgtttcttcctgtctctatgaatctgtctgttctagacacctcctataaggacaatcagagtatttgccctttcgagtctagcttatcttacttagcataatgtccccgaggctcatccatgttgtagtgtgtactagaattctttttaaagctgaatgtacatatatagcacttttcaacacccttcatccgttgaaggacgtttggttatttccaccttttggctatttctaatagtgttgctatggacatagatgtacaaataacatgtttgagttcctgccttctgttttttttaatgcttcctctgtcacccaggcgggagtacagtgacgggatcttgactcactgcaacccccgcctcccaggttcaaaagattctcttgcctccaccccgagtaactgggattacaggcatgcaccaccatgcctggctaatttttgtatttttagtagagacaaggttttactatgatggccaggctagtctcgaactcccgacctccagtgatccacctgcctcagcctcccaaaatgctgggattacaggtgtgagccaccgctcctggctgagttcctgctttgaactcttttgcagatatacccagcagtggaaatgctggctccagtagtaattctgtatttattttttaggaattgctgtgctgttttccatagtggctgcatcatttacattcccaccagcaacacacaatggcttccatttctccgcacccacaccaatacttgttgttttctagttttcttgcttttgtttgataatagccatcctaatgggtgagaaatggcccttccatttttaagtggttttttctctccttcaaaatgcaagtctcccagaagcactcagggaagggctgcatacaacatcgagggtctgcattgctttagcaccatttttcttatacaatatgaggacccagggcttgtcatgaagttctaaaactcctctaaagcaatgcattacactgattttttctttttgtcagctaggcagtaggcaccctaaaggcagacatcttctttttgttattatttatgctccttgtcagggttgagtgtgtggctttccccacgacaaacactcactgaccgcaatgctagacaccccaagacaagcacacgcagtcacccgagccgccaaggccattctcactcaaaccccagcccaccgggcctcactgaagccagagtgcgcagcacgcctcgctggcagaacttccttaggggaacgggctcgactcaccagagcttcttcagattgcacaacaggtgcttcagtcccacacacagaagtctgattccgaagtcaccgagggcgttgtcactcaggtccagctccaccagcttctggttgctgctgaggaccaaggagatgtcgaagcagcactcatgcgagaggccacagcgccccaaccttcatgccaagaacagaggcagaaagcatcagaacacacctgaccagagagctccagaacagaggaagcatcaggacacacctgatcaggaagctccggaatagagaaagcatcagaacacatctgatcagagagctccggaatacagaaagcatcagaacacacctgaccagagagctccggaatagagaaagcatcagaacacatctgaccagagagctccagaatagagaaagcatcaggacacacctgacaagagagctctggaatagagaaagcatcaggacacacctgaccagagagctctggaatagagaatgcatcaggacacacctgaccagagagctccggaatagagaaagcatcaggacacacctgaccagagagctccggaatagagaaagcatcaggacacacctgaccagagagctctggaatagagaaagcatcaggacacacctgaccagagagctctggaatagagaaagcatcagaatacacctgaccagagagctccggaatacagcacaaggcacattgggaggtcagcccccagtctccccagtcacagcagagggatcacctgtcagtgaactcccggccgtaaacagtgccgggtgcattgagatcaccccccagacatgtgaatggtgcgctcctggtttgtaagtgaagcgggcggtgtgggcctgtgcacccacctccttccctcgtgttcctaaccattgacgtgcccgcagtcggcactgccctcgccagtgctgcactcagctatttcttgtcttcaccaacattgtcaccccattgtgtttgacgatttcatcccagccctccatctatattgaaaggaaaagcagctctgattctttttcttttcttttcttttctttttttaaagacagggtctcactttgttgcacaggctggagtgcactggcgagatcatagctcactgccacctcgaactcctgggctcaagggatccacctgcctcagcctcccaagtggctgcaaatacaggcatgtgctaccatgcttagccattttattttatttatattttatttttattattattattatcttctaaagacaaggtctcaccagcttgctcaggctggttttgaactcctgggctcaggtgatctgcccacctcagcctctcaaagtgctgggattccacatcccgctgcagctctgattcttgattagtttccccgtcacacacatgcacacaaacacacacgcacatcactaccaccgtcaccaccaccaccagcaacaaaaactatactttatccctgtcatgggggcaagaacaacattctagcttctttccagggcaatagttcataggtcctggagcctgttagaccaccttcctttctgtccctatccttacaccaacttcaagcaaatggacaaatggatctctacttctctgcgaagcatctcactgtcccctacccttccctgtttgtgtctgcctctccagaatcatacaggggcaatggcagtggggagagaatttgggcatgaagttggagaaataaggttaaatgtcccaaacaaccagtctccatggcactacgatttgaaatttaccaaaagagcaaagatgaagagtgtgatctatatacataatggaatactgctcagccatagaaaagaatgaagtcacatctttgaagccacacagatggaactggaggccattaccttaagtgaaacaactcagaaacagagtcaaataccacacgttctcacttacaagtgggagctaaacaaagggtaacatccatagagcatggaatgatagacactagagcctcagaagggtgggagggtgggagccaggtgagggctggaaaattatttattgggtacaatgttcactatttgggtaagagttacactaaggccgggcacggtggctcacgcctgtaatcccagcactttgggaggccgaggcgggtggatcacgaggtcaggagtttgagaccagcctagccaatacggtgaaaccttgtccctactaaaaatacaaaaatcagctgggcgtggtggcccatgcctgtaatcccaactactcgaagaattgcttgaacccaggaggtggatgttgcagtgagccgagatcactccactgtactccagcctgggcaacacggcgagagtccatctcaaaaaaaaaggggtagttacagtaaaagcccagacactaccactgtgcagtaacatatccatgaaacaaagctgctcttgcgccccctacatctacaaaaataaatacataaagtaaaaaataaagagcagagcagacagaaagcatttaagccaccgaacagcacaatcgaatcagaattttctaaaggaccatcttacttttgtgcagagaatggtcgggtgagggaaaaaggcagacacagggagaccaaagagccaacattcattcagtgcgtgcttttgaccactgatgggtactaagatgtctgtccaggcgtggcaaagatgacagcaagacaaacaaacgcaaaccccatccccggggagctgatggtctaggaggtcactgcgtgtccaggcaagtggtgacagttgctggacctgggctggtggggtgaggacgaggaaaagtggaaaacagctcgggtaggaggaaaaattgataagactggtgacaaggtgagtgtgttgagccggagagggaggtagcaaaatgtcctagagtggcggactttaacacttgctgtgcagctcctcaaaaatgcagacgcctgcatgcgtccacagagcagggaatgaaacagagctagtgaggcggcccaggcaccagcgcggtggggcgtgtgaatctgattcatggtgtgggagaaagcaagcacattttttattattattattattattattattttgaaatggaatctcgctctgtcacccaggctggagtgcaatggcacgatctcggctcactgccatctccgcctcccgggtacacacagttctcctgcctcagcctcccgagtagctgggactacaggtgtgagcaagcacattattaataaagtcacaggagattccctgtgacatttcaacccatacaaagcattctgaccaggctgggcaacgtgatgagaccacatctctacaaaaaaaatacaaaaattagccagcatggtggtgcatgcctgtagtcccagctactcgggggagctgaggtgggaggattgcttgagcctgggaggtcgaggctgcagtaagctgtgatcacacactccagcctgggtgacagagagaggtcctgtctcaaagaaaaaaaaaaaaagtattttcatagtttttaggtgaggttgccattgttgtaaatggcaaattctccaactctcatctatgaacatggcccatgaggaaatggaatatatcgagcatcatggttgtttcaagaaatgactttttttttagttcctcattcattcttccccacacaaaacttccccagctggcctccaacccattctaccttctcacttgttctgggctgaactgtgcccccccaaaaatttacatgttgaagccctaatcctcaagacctcataatgtggctgttttgggaaatggggtctttaaaggagtgactagattaacattaggtcttgtgtagtcatgcctgactgtgcctaatccatcaggactgctgtccctgtaagaagaggagactaggccactcttccccccaaggcaagatggcatcagtacacagggagaagggggcatctacaaaccaaggagggcggcctcagaagaaaccaaccctgctgacaccttgatcttagactttcggcctcagaactgcaagaaaatgaatttttgttgttgaagccattcagtctgtggcactttgttacagcagaaaccacaccaccggccgggtgcggtggctcatgcctgtaatcccagcattttgggaggccgaggcgggcggatcacctgaggtcaggacttcgagactagcctggacaacatgatgaaaccccatctctactaaaaatacaaaaaattagctgggtatggtggtgggtgcctgtaatcccagctactcaggaggctgaggcaggagaatcacttgaacccaggaggcagagattgcagtgagccgaggtcacggcattgcactccagcctgggcaataagagcaaaactctgcctcaaaaaaagaaaaaaagaaaaagaaaagaaagaaaccacaccagcaacctggtcctgaagatctttctccagtctgtttctctctctctctctcatatgaacttgcactcacacagatcacatgcacggggactcaccacaatctccgaatgttacagccaggatgctggagcgtttcacacaacactctcatccctgggtcccccagagaattgtcactgaggtccaattcagttagactctggctggtgctcagaactgaaaagaggccccggcaaaaactggaagtgaggtggctgttcaccaatctaggaattagaaggaagacagacagaaaagaaatcagcctcgaataataactaactggagctgggggccggggtgcctggcaccagttcagagaaatgccttccggggattaagaaatgggtcacgaaaccaaaaattgttcccagagaaatgaagagggctggatgagccttggtaaaagcagttctgcctcctctcggacggagagcatgagcctgtgactgtggcggactgtggcaccctacagcctgctccccagtgtcctcctctcgcccttaccagtccactgtcccaacatggccctgaacgttctgtgctgggtgatcagagggcagtcctcactcctggctacacaacagcatcaggagtgctcacaaaaatcctcaggccaggctgggcatggtggctcacacctgtaatcccagcactttgggaggccgaggcgggcagatcacctgaggtcaggagttcaagatcagcctggccaacatggtgaaaccctctctctactaaaaatacaaaaattaattgggtgtggtggcacgagcctgtcatcccagctattagggaggctgaggcaggagaatcacttgaacctgggaggtggaagttgcagtgagccaagatcatgccacagcactccagcctgggcaacagagcaagacttcatctcaaaaaaaaaaaaaagaaaaagaaaatcgcaagcccaggccacatccatggaaataaaatcagaagctctgaggtggaactagatgaattttttaaattttttttcagatgaaacccaagctggaatgcagtgccatgatcatagctcactgcagcctcaaactcctgggctcaagcaatcctcttgcctcagcctcccgagtagctgaggttacaggcacgagtcactgtgtccagctatatggatcttttttatttaaaaaaagccaggtggctccaacatgcagtcacatttttgcttttgtttttctgtagagaggtgctctcactttgctgctcaggtaggacttgaattcctggcttcaagcaatccccccatcttggcctcccaaaacctaggattacaggcaagagccactgcacccacacatgcagtcacctttgaatcacctgtagctctcattcaaatgcaaagtctagctctctaggtctaagattgggtccacaatcctgcatttctaatagatgctcaggcttctggttctcagaagggactggaacatacaaagcaagctcctgccctcagagtaaggcagctgccatctagaaagatgggtgctgagccccctaccagggctccagtcagagtctgtcctcagagtaaggcaggtgccatctagagggatgggtgctgagccccctaccagggctcccgtcagagtctgtcctcagagtaaggcaggtgccatctagagggatgggtgctgagccccctaccagggttccagtcagagtctgtcctgaggaaggaaggtgctatctagagaaatgggtgctgagcctcctaccggggcttcagtgagagtctgtcctcagaggaaggaaggtgctatctagagaaatgggtgctgagccccctgccagggctccaatcagagtctgtcctcagaggaaggaaggtgctatctagagaaatggttgctgagcctcctaccggggcttcagtgagagtctgtcctcagagtaaggcaggtgccatctagagggatgggtgctgagccccctgccagggctccaatcagagtctgtcctcagaggaaggaaggtgctatctagagaaatgggtgctgagcctcctaccggggcttcagtgagagtctgtcctcagaggaaggaaggtgctatctagagaaatgggtgctgagccccctgccagggctccaatcagagtctgtcctcagaggaaggaaggtgctatctagagaaatgggtgctgagcctcctaccggggcttcagtgagagtctgtcctcagagtaaggcaggtgccatctagagggatgggtgctgagccccctaccagggctccagtcagaatctgtcctcagaggaaggaaggtgctatctagagaaatgggtgctgagcctcctaccggggcttcagtgagagtgtgcaaaccttcctcacagatgtgtgatcttcataaggtctccctgccctctccaccttccacctcactcttaatgagtagttctgcctacttttctctctgtcttactcttcttctcccatttctatggtctgaatgtttgtgtgccccaaaatccatacgctgaaatcctaaccctcaacatgacgtatcaggcgatggggcctttgaggtgtggttaagttatgagggtggagccctcaggagtgggattgctgtccttaggaaagggaccccagagagctgccttgcctcttcaccatgtaaggacacagtgagaaggcaccatcgaccagggaacaggccctcaccaaacaccagatctgccagagcctggatcatggacttcccagcctccagaaccgtaaggtgaaccttccttttgcttataagccaaccagcctgcagtgttttgttatggcaacctgatgaatgaagacaactgtcttttttccagtcactcggaactgtttgctgccgtagaaaccgtaccctgctttcccacacctgccctctctctcaacaccgtaagcccccagcctggctgcccctttccttctctcactctctcactgcccatcctccggaagctggctgagcggggacacccacccgtgccccgctggtgaacaggttcgtccccttgtgctttggatactctgcaagtttccttgtcagagcccatgaccccctccccgacatctgcacttgtttccggactgtcccacagccagacctcaagtccctgtgaccaggacctgggtcttcaccaccactgcggccctgtgggcagtcagtccttcatggccaaaccatgactaggaaggtggtcctggtcatggtaatgtcaacggatcaagaaagctgaaactcattgttgcctgtggaagggccaagcctcctgtttcccttaattttgccccacgtcaagtgtcttctatccaggctaaactcacacatcacagggtggccaccttcctacaaccactgtgggtggtccttctgcaggaggcactgaacgataaacccaaaagggactcagaagtcaggtgactcaaccacttcattgcacagacttggccactagcttccaaccacccagcaagtgtgtgaacagacccgaaaacggggttttggcaatgcccagtgcagagcaacatgggggcctagaaagagggtctccacatttctgctctatttcccttgatttaccttcatcatgtttttttccaaggaaactgtgtctctctccactgtcacctgcacacactttttctcagactgcattcatgatttggctcataccagtcttcagtgcagaattcctttaatttcttctctatgcgcccaggtcccaccattccttaaaggaggcttagattgcacatttctaagaaacatccccccagcctccagctctgaggccctctgtcccctcgctcctgggacacagactctctggcattgttctgccccacagacattgactgactcttaggcactagtgctccaagtagcttacaagaaatttcagttgacaaatatttgtaggcaatcctacatcctacttaataccttgtgctaaactggcattccccaaacatttgttccttgttttattttttttttcctcatcccatttatccacctaccatacatcaatctttgctcatgaaggagtctcaaacagacagtggtggcattatgatgtagctgtggcaacagtatttggaagatagttgaaaagagatgagaggaggcaagcgccaagaagaagctggcgaggaagcaggaggaagcacctggaagccgagtttccttacccatgagaacaggcagcatgagaggagcttgggaggacacactgcaccatatcaaggtgtcggccttccttttcctcctcctcttcctccttgggcatgttatggagaaaccccagggacagtgactccacccgatgacagttctcaatgcaaaaggaagaaaccatgtggtccattctggtggagagattgatctcaatcttggggaaatagtccatggccctttgcacgaagtcctcctcctgcatctcgtacaaacagtagaacaattccagctggctgggctggatctgcagctttttagctttggctttcacttcaatccatttcagcagctccagcctgatttgctgagagatcttgcaacttaatttcttctccaagtaggaggtcctctcctggtttaccaggccaaagaggaaacgtacaacaaaaatcaaataccccttttcgaatttgccatagttttccagaaggactgtcacgtctcggctgggaagcttcaaacgactccctggaacgttcgtccttccttccttttcctcttccagcaggtagtacatggcggcaaagaactcctggaaagtcatgtggatgaagctgtagaacttctcgcagtccacttccttttggaacaggttcatcctcaggaaagcagacacatccgccttctgcagtccatgattcctgaggtcggactcctcaaacaggattttctggttccagattccatctgcagccaaagagcagagcccccagaggtgggcgcagaggccgtgctcctggctccctccccggggctgcagcaaactggaaaggaagaagacgtacaccgcggtggtggtcttggatgtctgggcaaggctcttgccactctccatctgctgtttcagtccagtgcacacgatccagcagaccagggggatgaagcacatggtgaagaggacctcgttctcctgaatcagactgaaggctgccctggcttgggcctcatcagagaagtacttgaagaagtactctttccttttggcctcggagaaacccaggatctccacatgccgaggatggtccagcaagtgctgcagtttctccagggccacaggtctcgtggtgatgagcagagaggcctcgggaagcagcttctttctgatgaggctgctcaggagaatgtctccccgctcggccttctgccagtcagtgcagagcggtcctatgtgctcgtcaaaggcaccttgcagctcatcgaagccgtccatgaggaagaggattctggagggttttctcacgatcttgtggatgggtgggtttgggtcggggcagcagctcatgatcaggtcccccaggctcctctgtgtcacaaggctcacctctcgacagtggatatagaacagatagtcaaacctgtcttggtagagtgtccccgacgcccagtccaacatcatcttcctggccaggattgttttcccaatccctgccgccccctggaacaccacggtgtgcacaggctcagaatgctcatcatcggggtcaaacagcaactccatcttaatgggactcacggggctctcacacgtcttggtcttgccgatggccagaagctcctgctccctctcctgctggctccggtgctccttgatgagacgcagtcgtgtgtagcgtttgttgaggctcacactctcacccagacgggcattcctgtcttcaatgcactggaatctgcttctcacgtactttctgtacttcttacggtaatctacggcaaagacaggaagttagggggaaagtatacacacatccacctgagatgcgctctcagctggggcctgtcatcggaagcgagtggtaaccggaatggagaaatggaaggtgcagctcctccccactgggtaggaaaggtgccgagaatctctggtgtcaagtttttaagatacacagctgagcagaaggcccatctctatgtgtagctaccagcccaaagatcatttgaatcaatcttattcctttaagtaatctgcatcctatgccttatcaaacttgaaacgcttaatcaccgccgctggctctgggactgcaagagccacacaaacatgaatttgtttcttcaactgacaatggatttcctgagacaggcctttgcattccaaagagcaggaacctatagtatggccaagttacccagctgctcagcttcccagagcctcctgaaccaggtcttaaaactcaactagaagcaccaccccagtcgcttacctttcttcattttacaaatagagattctcgaaaggtactccagtaaacccatccactcctcttcaatgctgtcttcctggcatatcacagtgggattcgaaacacgtgcattatctgaacctaaaagggaaaaaaaaggtgtcaaaacccagaactattatcacagaggatgcaattgaaacctggcctaatatttggcatgagagaggagaccccaaacatcccccaaatcaaaacatggctctgagttgcagaggacaggtatccagtcaaaagtctggttgggagcatttctgcactcctagtttcaaaacaacttctgctgtccacctgccaagcatgtgttcccactgtccccagtctcagaatctcttcctcaggcctggaaatcaatcagcaaacatgcgaagcaggctaagtttcttttaccctcgtttgcttttgcctgcccctggcagcctgattgtgagggcatctccaagctctcctatatccccaacacggctgtgggctaagaaaggtcacccttccctgaccgcagttccctgcaatccattttacacacgtcttctattgtcaagtctagatgtctggttcttcaagagtgagaacgaccagtctatttcgtgcctaatctagtggttgggaatcctggctgactttagaatcacccaggaagctttaaaaatatggacttcaggactgcacgcccagaggttctttttcagtccctctgaggtgaggcccaggaaccatcacatactaaaagctcccaggtgattccaacatgcatctgtgttgagaatcacaaatccaaacagtcactagatagcatatcttaagaaggcattctataggagaaattcaggttaggtaaaacaagagttagtcactaggggaaatatataagacagataacttcaggtgggcaggaatctacaagtaacataaatgattttttttttttttttgagacagggcctcactctattgcccaggctggagtgcaatgacacaatcatggctccctgcagcctcaacctcctgggctcaagtgatcctcccacctcagcctccagaacagctgggactattgacacgtgccaccacacctaactaatgtttgcattttttgtagagacaggttctcactatgttgcccaggctggtctcaaactcctgggctcaagcaatcctcccatcttggcctcctgaagtgctgggattacaggcataagccactgcgcccagcccataaaagacctctgacagctgtctacttggtaaccatatcacaaaataaaatccaaaaaatctaagccaaaaccaaaatcttattctttttttttaagagacagagtcttgctttgtttccaaagctggagggcagtggcatggtcatagctcactccagcctggaactcctgagctcaagtgatgcacccacttcagccacctgagtaactgggactcaggtaggagccatgacagtaaattagccaaagtctattacctaaaacctaaccccaccccaggaaacaaacaaacaaacttctaaccctagttataacttttctgcctcaaaatccagatatggaagcaaagacggtgtagtggttaagagccaggctttgatcagagacatgccctgctttttaccccagctctggttatggctagaaataaaccatgggccagttaggatctcttccaggctcacctcattcacttgcaggagggataataccagaagctgtttcatgggtttcttgaatgtgccataaaatccataaaaactgcttagcaaagtacttctacagttgtgattatgacactttcatttgggtatgtgagtatataagtactgacacaatgataattgctttatttacttagagatgaggtctccctatgttgctcaggctggttttgagctcctgggctcaagcgatcctcctgccttagcctcctgagtagctgggactacaggtgagagccattgcagcaactggtttctgacctcccccggctgcacactgctgtctgtttccccagtgtcattacacccacactgctgccctgccttaacatgtgtctccctatccactgactcatttgtactcctccttcccatcaccaccagctctacatcatcatcctgcaataccctgcccttctctgagccctacctttgcctagaacacaagacaaaagaaagaaccttatccccaatgtgtacatggggattaagagaatttcttttacattccaattcccaaagtggtggtgaaaggaaaggcttctgccccaaactccacggttcttcaaggagagaggctgccctctgggccataggaagcagaggcccaagcctgctgaccacacagcagatactggacaaaacatgtggtctgagaagctggatggagaattggaggcaggtctaggcactgctgagattcagataaagagggactaatcatggcaggtgcccagggggtaggtacagtctgcatcagctttttaaaggagttagagaaagcaaacagtttgcctccaccttctcatagcactaccgtgagaggggaaaagagaaaaaaccaagacaatacaagaaaaaaaaatttttttttgaaacagggtcttgctctttagcccaggctggagtgccgtggtgcaatctcagctcactgcaacctccactccccatgttcaagcaattctcctacctcagcctcctgagtagctgggattacaggtgcccaccaccacacccggctaattttttttgtatttttagtagagatggggttttgccatgttggccaggctggtgttgaactcctgacctcaggtgatccacccacctcagcctcacaaagtgctggaattacaggcatgagccaccatgcccggccatgatttaaaaaaaaaaaaatcatactaacttctgtgcatcaaaggacacagttaaccaaatgaaaagacaacccacagaataggagaaaatatttgtaaatcatatatctgatatggggttaatatctagaatacataaagaactcctacaaggcaacaacaaaagccaaacctggtctgaaaatgagaaaagaacttgaacagaactttctctgaagaagctctataaatggccaacaagcagtgaaaatgtgctcagcatcacttatcattagggaaacggaaatcaaaactacagtgagataccacctcacactcattagaatggctactataaaaaagaaaaaataaataaaaataacgtgttcttaggatatggagaaattggaacccttgtgtgctgttggtgggaaatggtgcagatggtatctaaaacagtagagcagttcttcaaaatatttaacagaattaccgtatgattcagaaatttcacttctgagtatataccccagagaattcaaagcagggtcttgaagagatatttgtgcaccaacactcataacagcattaacaataacaaaaaggtagaagtaatccaggtgttcatcaacagataactaaacaaaatttggtatatggtaccatggagtatttatacagtcttttttaaaggaagggaattccgacacatgctacaacatagttgaacccggaggacattatgctgagtgaaataaactactcataaaggaaaaaatgctgtatgtttccacttatatgaggtacccagagtagtaagattcacagagatggcaaatagaatggtggttaccagggctgggagaatgaggcaatgaggagttatcattcaatgggtgaggagtttcagttttgcaagatgaaaacagttctggagactggttgcacaatgtgagtgtacctaacactactgaactgtacatttaaaaattattacggccgggcgcggtggctcacacctgtaattccagcactttgcgaggccgaggcgggtggatcacctgaggtcgggagtttgagaccaacctgaccaacatggagaaaccccatctctactaaaaatacaaaattagccgggcgtggaggtgcaatgcctgtaatcccagctacttgggaggctgaggcaggaaaatcgcttgaacccgggaggtggaggttgcagtgagccaagatctcaccattgcactccagcctgggcaacaagagcaactccgtctcaaaaaaaaatatatatatatatatatataaagatggaaaattgtacactatgtgcacttggccacaattttttttaaaagtcttccttccactcaccccacttcggctcatctctttttgctttctcataaaggtctctcctgttgatcgcagcgaagatccacacggccatggcccacgccttctcctccccattgaagtcgatcattagcgtggctagatccacatggtctgccttctctgtctgacccctcgggagggggatgcagcccttctggggaggatagtcctctaagtgcatcttaaatttcttcaagtccacatcctccaggtcctccaggtacctggccagcttgcagcgggtgcttgccatcttcatctgcagctgttttcagggtccttaggcttcggtccacactaagataccaggcagtgaacacggcacacggatgagtcttttttaaagtctccactttgagagatataaattatcaaaaactcagcaaacagaaagaaaaaaatgtcacatgactgtaacaagtcaaaatctttaattttgaaaagttagccaaggccgggcacagtggctcacgcctgtaatcccagcactttgagaggccaaggcaggcagatcacctgagctgaggaattcaagaccagcctggccaacatggcaaaactgtgtctctactaaaagtacaaaaatgagccgggtgtggtggcgggcgcctgtaatcccagctactcaggaagttgaggtaggagaattgattgaacccgggaagtggaggctgcagtgagccaagatcacgccactgcactccagcctaggcgacacagcaagactccatctcaaaaaaaaaaaagttagccaaatgcttaccagaaagttctcctgttggctcgatccaggagtgtgtcctgagccatggaagaaaggtttccctatggagggaaaaatatgcaaacaaatccataaacaggattgtattacagtttacggtgaacaaccacttcacgatgccatcttgacccatcagcaagaaaatttttgtcccgttgattacggggctatgacattggacaaactcttcactattcctcaacttcagtttcctcatctacaaaatgagaaagcagaagagaatgttttcagttcctccaaactgaaggctctggctctttgcttctgtttttgtgagggaagagggatgagagacaatagaaggagaaggccaggaggtgagtaagtgtgttgataacagaacaggacgtggctagggagagaggagagagaacataaaagcttgcagaggaggggacagtctttgactgcacttctatcaaccagtggattgaagtgagatgaagctgggagtgcataatggagaataataaaaacatacatccctgtaatcccagcactttgggaggccgaggtgggcggatcacctgaggtcaggagttggagaccaggctcaccaaacaacagggagaaatcccgtctctactaaaaatacaaaaattaaccgggcatggtaccaggcacctgtaatcccagctactcgggaggctgaggcaggagaatcgcttgaacccaggaggcggaggttgcgatgagccaagatcacaccactgcactccagcctgggcaataagagcaaaactccatctcaaaaaataaaatagaataaaataaaataaataaaaacatacatcctttaatgtctccttgcaaaattcgcaattgttatcattataattcacattaatttagagctttccacaggctaggcactcactgatgtttttccccatctaacctgcacagagctctatgaggtgcacctattcctagccccattttatagatgcataaactgagtcttagggggactaggaagcctgccgaggggtttagaaccaggaaggaacagagccaggattttgaccagagatatgagaccatgtcttccatcacttgtttcagtcagacaaagacaaagacaacaaaatagatgactaaaagacacacttccccagcatttatcacaggtgtatcactgcagcattcaccaacatagtcttcccaactagactgtgagttccacaaaaactagcaatcacctgctgtatctttagatcttccatatctcctagagtccggatggatgaacaagttggctttgtttggaattgttccctccttgatcccttgattatactctatttggcaaagcacctcaacctaaagccataaataacactcaagggaggcagagagcctggaaaacggtggagctctccaaattggaatttctgtgactgcagttcaatgtcaagatgcctcagactcactcatctctcccgtcccatctccattcctgcctatctactcctcgcctcctgagccctgcaaacccagccctgtgcatcctgaggtgactgctctccagacagccctattagctccgcataccctcccagctcctgcccatcctgaggtgactgctctccagacagccctattagctccgcataccctcccagctcctgccccatcagtccttccatctgcatcaggattctgcctttcttctgtgctccttccaccctaacaccagcacaaaaatctgctgccctttggtctttaaggaggtttgtttccttctgtatatcccatccatcttctcccctgggagggatactgggcaaatctgctgaagtcgtgggtgtaaactatggttgctgccgctgtcctccccgcttccccccgccacatacacacacacgaacttgcacac

SEQ ID NO: 2 - protein, 1036 aa, Artificial Sequence
  NLRP3 Canonical
MKMASTRCKLARYLEDLEDVDLKKFKMHLEDYPPQKGCIPLPRGQTEKADHVDLATLMIDFNGEEKAWAMAVWIFAAINRRDLYEKAKRDEPKWGSDNARVSNPTVICQEDSIEEEWMGLLEYLSRISICKMKKDYRKKYRKYVRSRFQCIEDRNARLGESVSLNKRYTRLRLIKEHRSQQEREQELLAIGKTKTCESPVSPIKMELLFDPDDEHSEPVHTVVFQGAAGIGKTILARKMMLDWASGTLYQDRFDYLFYIHCREVSLVTQRSLGDLIMSCCPDPNPPIHKIVRKPSRILFLMDGFDELQGAFDEHIGPLCTDWQKAERGDILLSSLIRKKLLPEASLLITTRPVALEKLQHLLDHPRHVEILGFSEAKRKEYFFKYFSDEAQARAAFSLIQENEVLFTMCFIPLVCWIVCTGLKQQMESGKSLAQTSKTTTAVYVFFLSSLLQPRGGSQEHGLCAHLWGLCSLAADGIWNQKILFEESDLRNHGLQKADVSAFLRMNLFQKEVDCEKFYSFIHMTFQEFFAAMYYLLEEEKEGRTNVPGSRLKLPSRDVTVLLENYGKFEKGYLIFVVRFLFGLVNQERTSYLEKKLSCKISQQIRLELLKWIEVKAKAKKLQIQPSQLELFYCLYEMQEEDFVQRAMDYFPKIEINLSTRMDHMVSSFCIENCHRVESLSLGFLHNMPKEEEEEEKEGRHLDMVQCVLPSSSHAACSHGLVNSHLTSSFCRGLFSVLSTSQSLTELDLSDNSLGDPGMRVLCETLQHPGCNIRRLWLGRCGLSHECCFDISLVLSSNQKLVELDLSDNALGDFGIRLLCVGLKHLLCNLKKLWLVSCCLTSACCQDLASVLSTSHSLTRLYVGENALGDSGVAILCEKAKNPQCNLQKLGLVNSGLTSVCCSALSSVLSTNQNLTHLYLRGNTLGDKGIKLLCEGLLHPDCKLQVLELDNCNLTSHCCWDLSTLLTSSQSLRKLSLGNNDLGDLGVMMFCEVLKQQSCLLQNLGLSEMYFNYETKSALETLQEEKPELTVVFEPSW

SEQ ID NO: 3 - DNA, 4470 bp, Artificial Sequence
  Synthetic
gtagatgaggaaactgaagttgaggaatagtgaagagtttgtccaatgtcatagccccgtaatcaacgggacaaaaattttcttgctgatgggtcaagatggcatcgtgaagtggttgttcaccgtaaactgtaatacaatcctgtttatggatttgtttgcatatttttccctccatagggaaacctttcttccatggctcaggacacactcctggatcgagccaacaggagaactttctggtaagcatttggctaacttttttttttttgagatggagtcttgctgtgtcgcctaggctggagtgcagtggcgtgatcttggctcactgcagcctccacttcccgggttcaatcaattctcctacctcaacttcctgagtagctgggattacaggcgcccgccaccacacccggctcatttttgtacttttagtagagacacagttttgccatgttggccaggctggtcttgaattcctcagctcaggtgatctgcctgccttggcctctcaaagtgctgggattacaggcgtgagccactgtgcccggccttggctaacttttcaaaattaaagattttgacttgttacagtcatgtgacatttttttctttctgtttgctgagtttttgataatttatatctctcaaagtggagactttaaaaaagactcatccgtgtgccgtgttcactgcctggtatcttagtgtggaccgaagcctaaggaccctgaaaacagctgcagatgaagatggcaagcacccgctgcaagctggccaggtacctggaggacctggaggatgtggacttgaagaaatttaagatgcacttagaggactatcctccccagaagggctgcatccccctcccgaggggtcagacagagaaggcagaccatgtggatctagccacgctaatgatcgacttcaatggggaggagaaggcgtgggccatggccgtgtggatcttcgctgcgatcaacaggagagacctttatgagaaagcaaaaagagatgagccgaagtggggttcagataatgcacgtgtttcgaatcccactgtgatatgccaggaagacagcattgaagaggagtggatgggtttactggagtacctttcgagaatctctatttgtaaaatgaagaaagattaccgtaagaagtacagaaagtacgtgagaagcagattccagtgcattgaagacaggaatgcccgtctgggtgagagtgtgagcctcaacaaacgctacacacgactgcgtctcatcaaggagcaccggagccagcaggagagggagcaggagcttctggccatcggcaagaccaagacgtgtgagagccccgtgagtcccattaagatggagttgctgtttgaccccgatgatgagcattctgagcctgtgcacaccgtggtgttccagggggcggcagggattgggaaaacaatcctggccaggaagatgatgttggactgggcgtcggggacactctaccaagacaggtttgactatctgttctatatccactgtcgggaggtgagccttgtgacacagaggagcctgggggacctgatcatgagctgctgccccgacccaaacccacccatccacaagatcgtgagaaaaccctccagaatcctcttcctcatggacggcttcgatgagctgcaaggtgcctttgacgagcacataggaccgctctgcactgactggcagaaggccgagcggggagacattctcctgagcagcctcatcagaaagaagctgcttcccgaggcctctctgctcatcaccacgagacctgtggccctggagaaactgcagcacttgctggaccatcctcggcatgtggagatcctgggtttctccgaggccaaaaggaaagagtacttcttcaagtacttctctgatgaggcccaagccagggcagccttcagtctgattcaggagaacgaggtcctcttcaccatgtgcttcatccccctggtctgctggatcgtgtgcactggactgaaacagcagatggagagtggcaagagccttgcccagacatccaagaccaccaccgcggtgtacgtcttcttcctttccagtttgctgcagccccggggagggagccaggagcacggcctctgcgcccacctctgggggctctgctctttggctgcagatggaatctggaaccagaaaatcctgtttgaggagtccgacctcaggaatcatggactgcagaaggcggatgtgtctgctttcctgaggatgaacctgttccaaaaggaagtggactgcgagaagttctacagcttcatccacatgactttccaggagttctttgccgccatgtactacctgctggaagaggaaaaggaaggaaggacgaacgttccagggagtcgtttgaagcttcccagccgagacgtgacagtccttctggaaaactatggcaaattcgaaaaggggtatttgatttttgttgtacgtttcctctttggcctggtaaaccaggagaggacctcctacttggagaagaaattaagttgcaagatctctcagcaaatcaggctggagctgctgaaatggattgaagtgaaagccaaagctaaaaagctgcagatccagcccagccagctggaattgttctactgtttgtacgagatgcaggaggaggacttcgtgcaaagggccatggactatttccccaagattgagatcaatctctccaccagaatggaccacatggtttcttccttttgcattgagaactgtcatcgggtggagtcactgtccctggggtttctccataacatgcccaaggaggaagaggaggaggaaaaggaaggccgacaccttgatatggtgcagtgtgtcctcccaagctcctctcatgctgcctgttctcatggattggtgaacagccacctcacttccagtttttgccggggcctcttttcagttctgagcaccagccagagtctaactgaattggacctcagtgacaattctctgggggacccagggatgagagtgttgtgtgaaacgctccagcatcctggctgtaacattcggagattgtggttggggcgctgtggcctctcgcatgagtgctgcttcgacatctccttggtcctcagcagcaaccagaagctggtggagctggacctgagtgacaacgccctcggtgacttcggaatcagacttctgtgtgtgggactgaagcacctgttgtgcaatctgaagaagctctggttggtcagctgctgcctcacatcagcatgttgtcaggatcttgcatcagtattgagcaccagccattccctgaccagactctatgtgggggagaatgccttgggagactcaggagtcgcaattttatgtgaaaaagccaagaatccacagtgtaacctgcagaaactggggttggtgaattctggccttacgtcagtctgttgttcagctttgtcctcggtactcagcactaatcagaatctcacgcacctttacctgcgaggcaacactctcggagacaaggggatcaaactactctgtgagggactcttgcaccccgactgcaagcttcaggtgttggaattagacaactgcaacctcacgtcacactgctgctgggatctttccacacttctgacctccagccagagcctgcgaaagctgagcctgggcaacaatgacctgggcgacctgggggtcatgatgttctgtgaagtgctgaaacagcagagctgcctcctgcagaacctggggttgtctgaaatgtatttcaattatgagacaaaaagtgcgttagaaacacttcaagaagaaaagcctgagctgaccgtcgtctttgagccttcttggtaggagtggaaacggggctgccagacgccagtgttctccggtccctccagctgggggccctcaggtggagagagctgcgatccatccaggccaagaccacagctctgtgatccttccggtggagtgtcggagaagagagcttgccgacgatgccttcctgtgcagagcttgggcatctcctttacgccagggtgaggaagacaccaggacaatgacagcatcgggtgttgttgtcatcacagcgcctcagttagaggatgttcctcttggtgacctcatgtaattagctcattcaataaagcactttctttatttttctcttctctgtctaactttctttttcctatcttttttcttctttgttctgtttacttttgctcatatcatcattcccgctatctttctattaactgaccataacacagaactagttgactatatattatgttgaaattttatggcagctatttatttatttaaattttttgtaacagttttgttttctaataagaaaaatccatgctttttgtagctggttgaaaattcaggaatatgtaaaactttttggtatttaattaaattgattccttttcttaattttaaaaaaaaaaaaaaa

SEQ ID NO: 4 - protein, 922 aa, Artificial Sequence
  NLRP3-2
MKMASTRCKLARYLEDLEDVDLKKFKMHLEDYPPQKGCIPLPRGQTEKADHVDLATLMIDFNGEEKAWAMAVWIFAAINRRDLYEKAKRDEPKWGSDNARVSNPTVICQEDSIEEEWMGLLEYLSRISICKMKKDYRKKYRKYVRSRFQCIEDRNARLGESVSLNKRYTRLRLIKEHRSQQEREQELLAIGKTKTCESPVSPIKMELLFDPDDEHSEPVHTVVFQGAAGIGKTILARKMMLDWASGTLYQDRFDYLFYIHCREVSLVTQRSLGDLIMSCCPDPNPPIHKIVRKPSRILFLMDGFDELQGAFDEHIGPLCTDWQKAERGDILLSSLIRKKLLPEASLLITTRPVALEKLQHLLDHPRHVEILGFSEAKRKEYFFKYFSDEAQARAAFSLIQENEVLFTMCFIPLVCWIVCTGLKQQMESGKSLAQTSKTTTAVYVFFLSSLLQPRGGSQEHGLCAHLWGLCSLAADGIWNQKILFEESDLRNHGLQKADVSAFLRMNLFQKEVDCEKFYSFIHMTFQEFFAAMYYLLEEEKEGRTNVPGSRLKLPSRDVTVLLENYGKFEKGYLIFVVRFLFGLVNQERTSYLEKKLSCKISQQIRLELLKWIEVKAKAKKLQIQPSQLELFYCLYEMQEEDFVQRAMDYFPKIEINLSTRMDHMVSSFCIENCHRVESLSLGFLHNMPKEEEEEEKEGRHLDMVQCVLPSSSHAACSHGLGRCGLSHECCFDISLVLSSNQKLVELDLSDNALGDFGIRLLCVGLKHLLCNLKKLWLVNSGLTSVCCSALSSVLSTNQNLTHLYLRGNTLGDKGIKLLCEGLLHPDCKLQVLELDNCNLTSHCCWDLSTLLTSSQSLRKLSLGNNDLGDLGVMMFCEVLKQQSCLLQNLGLSEMYFNYETKSALETLQEEKPELTVVFEPSW

SEQ ID NO: 5 - protein, 719 aa, Artificial Sequence
  NLRP3-3
MKMASTRCKLARYLEDLEDVDLKKFKMHLEDYPPQKGCIPLPRGQTEKADHVDLATLMIDFNGEEKAWAMAVWIFAAINRRDLYEKAKRDEPKWGSDNARVSNPTVICQEDSIEEEWMGLLEYLSRISICKMKKDYRKKYRKYVRSRFQCIEDRNARLGESVSLNKRYTRLRLIKEHRSQQEREQELLAIGKTKTCESPVSPIKMELLFDPDDEHSEPVHTVVFQGAAGIGKTILARKMMLDWASGTLYQDRFDYLFYIHCREVSLVTQRSLGDLIMSCCPDPNPPIHKIVRKPSRILFLMDGFDELQGAFDEHIGPLCTDWQKAERGDILLSSLIRKKLLPEASLLITTRPVALEKLQHLLDHPRHVEILGFSEAKRKEYFFKYFSDEAQARAAFSLIQENEVLFTMCFIPLVCWIVCTGLKQQMESGKSLAQTSKTTTAVYVFFLSSLLQPRGGSQEHGLCAHLWGLCSLAADGIWNQKILFEESDLRNHGLQKADVSAFLRMNLFQKEVDCEKFYSFIHMTFQEFFAAMYYLLEEEKEGRTNVPGSRLKLPSRDVTVLLENYGKFEKGYLIFVVRFLFGLVNQERTSYLEKKLSCKISQQIRLELLKWIEVKAKAKKLQIQPSQLELFYCLYEMQEEDFVQRAMDYFPKIEINLSTRMDHMVSSFCIENCHRVESLSLGFLHNMPKEEEEEEKEGRHLDMVQCVLPSSSHAACSHG

SEQ ID NO: 6 - protein, 979 aa, Artificial Sequence
  NLRP3-4
MKMASTRCKLARYLEDLEDVDLKKFKMHLEDYPPQKGCIPLPRGQTEKADHVDLATLMIDFNGEEKAWAMAVWIFAAINRRDLYEKAKRDEPKWGSDNARVSNPTVICQEDSIEEEWMGLLEYLSRISICKMKKDYRKKYRKYVRSRFQCIEDRNARLGESVSLNKRYTRLRLIKEHRSQQEREQELLAIGKTKTCESPVSPIKMELLFDPDDEHSEPVHTVVFQGAAGIGKTILARKMMLDWASGTLYQDRFDYLFYIHCREVSLVTQRSLGDLIMSCCPDPNPPIHKIVRKPSRILFLMDGFDELQGAFDEHIGPLCTDWQKAERGDILLSSLIRKKLLPEASLLITTRPVALEKLQHLLDHPRHVEILGFSEAKRKEYFFKYFSDEAQARAAFSLIQENEVLFTMCFIPLVCWIVCTGLKQQMESGKSLAQTSKTTTAVYVFFLSSLLQPRGGSQEHGLCAHLWGLCSLAADGIWNQKILFEESDLRNHGLQKADVSAFLRMNLFQKEVDCEKFYSFIHMTFQEFFAAMYYLLEEEKEGRTNVPGSRLKLPSRDVTVLLENYGKFEKGYLIFVVRFLFGLVNQERTSYLEKKLSCKISQQIRLELLKWIEVKAKAKKLQIQPSQLELFYCLYEMQEEDFVQRAMDYFPKIEINLSTRMDHMVSSFCIENCHRVESLSLGFLHNMPKEEEEEEKEGRHLDMVQCVLPSSSHAACSHGLGRCGLSHECCFDISLVLSSNQKLVELDLSDNALGDFGIRLLCVGLKHLLCNLKKLWLVSCCLTSACCQDLASVLSTSHSLTRLYVGENALGDSGVAILCEKAKNPQCNLQKLGLVNSGLTSVCCSALSSVLSTNQNLTHLYLRGNTLGDKGIKLLCEGLLHPDCKLQVLELDNCNLTSHCCWDLSTLLTSSQSLRKLSLGNNDLGDLGVMMFCEVLKQQSCLLQNLGLSEMYFNYETKSALETLQEEKPELTVVFEPSW

SEQ ID NO: 7 - protein, 979 aa, Artificial Sequence
  NLRP3-5
MKMASTRCKLARYLEDLEDVDLKKFKMHLEDYPPQKGCIPLPRGQTEKADHVDLATLMIDFNGEEKAWAMAVWIFAAINRRDLYEKAKRDEPKWGSDNARVSNPTVICQEDSIEEEWMGLLEYLSRISICKMKKDYRKKYRKYVRSRFQCIEDRNARLGESVSLNKRYTRLRLIKEHRSQQEREQELLAIGKTKTCESPVSPIKMELLFDPDDEHSEPVHTVVFQGAAGIGKTILARKMMLDWASGTLYQDRFDYLFYIHCREVSLVTQRSLGDLIMSCCPDPNPPIHKIVRKPSRILFLMDGFDELQGAFDEHIGPLCTDWQKAERGDILLSSLIRKKLLPEASLLITTRPVALEKLQHLLDHPRHVEILGFSEAKRKEYFFKYFSDEAQARAAFSLIQENEVLFTMCFIPLVCWIVCTGLKQQMESGKSLAQTSKTTTAVYVFFLSSLLQPRGGSQEHGLCAHLWGLCSLAADGIWNQKILFEESDLRNHGLQKADVSAFLRMNLFQKEVDCEKFYSFIHMTFQEFFAAMYYLLEEEKEGRTNVPGSRLKLPSRDVTVLLENYGKFEKGYLIFVVRFLFGLVNQERTSYLEKKLSCKISQQIRLELLKWIEVKAKAKKLQIQPSQLELFYCLYEMQEEDFVQRAMDYFPKIEINLSTRMDHMVSSFCIENCHRVESLSLGFLHNMPKEEEEEEKEGRHLDMVQCVLPSSSHAACSHGLVNSHLTSSFCRGLFSVLSTSQSLTELDLSDNSLGDPGMRVLCETLQHPGCNIRRLWLGRCGLSHECCFDISLVLSSNQKLVELDLSDNALGDFGIRLLCVGLKHLLCNLKKLWLVNSGLTSVCCSALSSVLSTNQNLTHLYLRGNTLGDKGIKLLCEGLLHPDCKLQVLELDNCNLTSHCCWDLSTLLTSSQSLRKLSLGNNDLGDLGVMMFCEVLKQQSCLLQNLGLSEMYFNYETKSALETLQEEKPELTVVFEPSW

SEQ ID NO: 8 - protein, 1016 aa, Artificial Sequence
  NLRP3-6
MKMASTRCKLARYLEDLEDVDLKKFKMHLEDYPPQKGCIPLPRGQTEKADHVDLATLMIDFNGEEKAWAMAVWIFAAINRRDLYEKAKRDEPKWGSDNARVSNPTVICQEDSIEEEWMGLLEYLSRISICKMKKDYRKKYRKYVRSRFQCIEDRNARLGESVSLNKRYTRLRLIKEHRSQQEREQELLAIGKTKTCESPVSPIKMELLFDPDDEHSEPVHTVVFQGAAGIGKTILARKMMLDWASGTLYQDRFDYLFYIHCREVSLVTQRSLGDLIMSCCPDPNPPIHKIVRKPSRILFLMDGFDELQGAFDEHIGPLCTDWQKAERGDILLSSLIRKKLLPEASLLITTRPVALEKLQHLLDHPRHVEILGFSEAKRKEYFFKYFSDEAQARAAFSLIQENEVLFTMCFIPLVCWIVCTGLKQQMESGKSLAQTSKTTTAVYVFFLSSLLQPRGGSQEHGLCAHLWGLCSLAADGIWNQKILFEESDLRNHGLQKADVSAFLRMNLFQKEVDCEKFYSFIHMTFQEFFAAMYYLLEEEKEGRTNVPGSRLKLPSRDVTVLLENYGKFEKGYLIFVVRFLFGLVNQERTSYLEKKLSCKISQQIRLELLKWIEVKAKAKKLQIQPSQLELFYCLYEMQEEDFVQRAMDYFPKIEINLSTRMDHMVSSFCIENCHRVESLSLGFLHNMPKEEEEEEKEGRHLDMVQCVLPSSSHAACSHGLVNSHLTSSFCRGLFSVLSTSQSLTELDLSDNSLGDPGMRVLCETLQHPGCNIRRLCNQKLVELDLSDNALGDFGIRLLCVGLKHLLCNLKKLWLVSCCLTSACCQDLASVLSTSHSLTRLYVGENALGDSGVAILCEKAKNPQCNLQKLGLVNSGLTSVCCSALSSVLSTNQNLTHLYLRGNTLGDKGIKLLCEGLLHPDCKLQVLELDNCNLTSHCCWDLSTLLTSSQSLRKLSLGNNDLGDLGVMMFCEVLKQQSCLLQNLGLSEMYFNYETKSALETLQEEKPELTVVFEPSW

SEQ ID NO: 9-10 - skipped (2 entries)

SEQ ID NO: 11 - DNA, 16010 bp, Artificial Sequence
  STAT6
agagctccagggagggacctgggtagaaggagaagccggaaacagcgggctggggcagccactgcttacactgaagagggaggacgggagaggagtgtgtgtgtgtgtgtgtgtgtgtgtgtgtatgtatgtgtgtgctttatcttatttttctttttggtggtggtggtggaaggggggaggtgctagcagggccagccttgaactcgctggacagagctacagacctatggggcctggaagtgcccgctgagaaagggagaagacagcagaggggttgccgaggtgaggggttgcctccgaggtgggtgcgggggcctctatgagtgcatgggggtggattcgtggggggagctctcgggatcctcccctggctgggtggatggtccccaagagatggtttcagctagtgttggtggctggtggcactgggttttagcagtttcgaactcctggaggaatctgggagggtccaggcctcagtactcccctcccccatgggtcacgttttcacagcctcacccctgcacccccagggccatggaaagtcagggaaaggaggtgaaggagtgcccctctgccctgagtcgggggaagtggccgcccctccctggaaggttgatgccagagggcagtggatccttgttaaacccctatcctgccctccactaaaggttcctgttcaagggtgtggctggggcgtgagcaagccccagatgtagacctcatggtggcccagacgagggggaatttccccctcaaaactgctccacgcttggctgctgtagacgctgagatttcccagcggcggcgccgagttaaccctcctcgtgctgaactggctccacctccccgcctgcccccaccgccacattcacgcattgggcaactcagagaagctgttttaactttcgatcctgtggtcccacaatcagaggactcgggcagataggggttgagataagcgagtttaggccaccaagcgggcggacgaggatcccagaccttgcgcttcccttctgagtttgggaggtaacactggccccgcccctcacgccgtggctcctccctcccttccccttcaaggggctgaagacaaaaggtgcccctgtcctggtcaagccaatcgacccagccttgttatgggttggggtggggagaaatgtgtcctcctgatggctggggaagaagaggggttggatatttctagccagggccatgccaggaggctggtcactctgcaaggggatgcagaggaaagcggtgcccactcactccagaggacctttctctcttgggctagagaaaggcctattggaggaacctgagcaggaggggtaaggattctgccttgaggagaaaagagctggggtaagtgggcactggaggaaagaggggcatgaaggtcttggagcagaaacgtccagagaagggacctctccattttccatccctctgagaggcctgggagaggtgagaggctgaacgtgcaacaggaggacttggggttactgggtttggggagacctggggagttgtcatcccatcctctccctcatctctgggagagggatattatgagaaacgtgaactgagaggcccctgggaaaccactggttacccagtcctccctgaacctggaaatggggatgcaaccccctcttctacttccctgtcccctcctctcctttctacctgttttcgtctctcatctttgccttctagccctccagcttcctctctcttctaggctctttcctcctagcttactaaacccgccttttttccagtctcttccatcctcttccttagttctctctactttccttttccacctctcctccttcaagtctcctcccaccttcccccacttcttaggatgatcagatttgcccctggaagggatcctaacaacacagtgcgatggttaatccccactcagattcaaagcctgctttccaaactcacttactgagtggccttgggcagagtagagaaactccttaagcctcagtttcttcatctataaaatgggatattatatattttaaaaagtgtcgtgaggcctgaaggagataatacactgagtgtaatgcctcatacacagtaagtgcttaacaaatagtagctgttattactctcccatcctcttcatcatctagccttgtggttttcatttttattttatttcatttatttatttatttattttgaggcagagtctctctctgtcgcccaggctggagtgcagtggctcgatctctgctcactgcaagctccgccccccaggttcacgccattctgtcacctcagcctccccagtagctgggactacaggcgctcgccaccacgccctgctaattttgtttttgtatttttagtagagatggggtttcactgtgttagccaggatggtcttgatctcctgacctcgtgatctgcccgcctcggcctcccaaagcgctgggattacaggcatgagccactgcgcctggccgagccttgtggttttcaaattatctcatggagtcctagaattttgagaggtttgtctagggatgcctttggcgtcaggaggtggggagagggaagtagaagcagtcgagtttcaggctttccatgcttgctttcaacagggcatcttcggtttcgtaccttttatgtaattgagattccacagattaaaagctgacattgcctaccgctttaaaaagtttggaaagttttccactcatctaacactcatattttatagatgagaagatcgaagcccacaaagggaaggctctttgcccacagaaccagagccaggtctagagctgcaactaaatcctctgccactctaagagagctctcgctctactgccctgtctccctttgcctccccatccctctggctacagctcagctcttcccacccctgtgtctatcactgaaggagttacccccatctcaggcattgactcaggatgcccctggtttaaggtggtctggccatgagtggtggtggggacggtccctaggagggctatctatgggaggtccctggctgccccaggagataggccaagtttcttgggcacccctcagagtggccttatttttctcctccaggcaacctccaagtcccagatcatgtctctgtggggtctggtctccaagatgcccccagaaaaagtgcagcggctctatgtcgactttccccaacacctgcggcatcttctgggtgactggctggagagccagccctggtgagtcctggctgctccctgctggtcccccaagtcttccctaactcatcttccttctccttagatttttctcccctcacccatggattcagaacttgagacctgttattccatgtgtagtgacctagatttagcagggagtctgtgccccatcaagaccaggctatgaatgttgacagatggagaccccatctcttaggaggctgagccgaagaggaggggggtttgggctgggacaaaggcacttctcataacagctagaagactgggaaacaaggcgcatgggtgaaagctacagagggcctagatggagaataaggagcgagaaaggaactgctgagcttttggctgtggggtaaagggtcaggagagctgaggaagccctggcctgaggtagcctcatcctgatcttcctgcagggagttcctggtcggctccgacgccttctgctgcaacttggctagtgccctactttcagacactgtccagcaccttcaggcctcggtgggagagcagggggaggggagcaccatcttgcaacacatcagcacccttgaggtggggcaggaggggaggggacaaggctgggtggggctgaggttgaactgggttgagcattgggccctggaagaaaattggttggatgctggaagcaaattggtgttcctgtggttaactgctagctagcaggcaaattagattttaaaagcatgcaaatgcacaaaaacttctggagtctacagttgtgcttccttatagtatatgtgtgaatgcaggcctggggattggagggattgaaggacatgggtaagagcaaagctcactgtttaccaccctcatttctgtagagcatatatcagagggaccccctgaagctggtggccactttcagacaaatacttcaaggagagaaaaaagctgttatggaacaggtattgtgatattccacctcccaccccaactcaatcccctgagactttggcctgagccatgacaaactagaaagaatttgaacctcagtaaaggctcagtgttctaggcccaggaatgaccaaaggaggttcctagggtcagagtgaaccccaagtcaagctcagggaatctttctatgagggactgaaggtaagaggccggggagaacagagcaagggataaggagctgattctgctaggagcaaggtcttatctccacgatattccaaaaggtcaggaagaactgccaaaggggagaggggaacaagaaaacgctatctgcagagcagagagtggaggccaggtatagagggatgagcagagtgtttcacttcttggcatctgtccttcctgtgtagttccgccacttgccaatgcctttccactggaagcaggaagaactcaagtttaagacaggcttgcggaggctgcagcaccgagtaggggagatccaccttctccgagaagccctgcagaagggggctgaggctggccaaggtgggggccagggtggttctggggagtgtgtaggagtggttgcctcttggatctcaaccttatctgaacctctaatctgtctgcacccttgatttctgcccccaaccctcagtgtctctgcacagcttgatagaaactcctgctaatgggactgggccaagtgaggtgagtaatgggctgacaggtggagaccttggtcaaagtgcagctggagggatggaagctagacctcagaaagacacaggctgaagtagggcaagggaatgccagaggagtgagaaaaagagccgtatcccaggagctgggtgtggaggcagcgtgaggccctggctcaggcccctctctgcccataggccctggccatgctactgcaggagaccactggagagctagaggcagccaaagccctagtgctgaagaggatccagatttggaaacggcagcagcagctggcagggaatggcgcaccgtttgaggagagcctggccccactccaggagaggttgggctagggctgatggggaagagggggcaagctgggggtgggcagctgaccctgctgaaggccctacaggtgagagaaagaagccaggcgggagggccttggagtggaccaagatgcataaaagccagttccagcggggctgtgcacactgtcgttcaggtcgcatcctgtacaagtgggcctagtggaggggcacaagcggggactcatccaacccaggcttctctcctcaagccccatgcctagaggaataggagggcttttccatttggtttattgggtgggaacactttccaatttgccacaaagcactgtaagtggtggcagttgtcctgggtgcaagagccgtcgggggagaggcagctgggtttccacagggggtgtaggcactgagaatgaacctcccacccagaccctaggccaacagatcacagaacccccttcagcccaggtgccttgcagccacacccactacccaccccacttctccacacatgatagcctttctccctgggtataggggaagggggtctgggccggagcaagcagccttaatcctgtgccccctgaccactgtcctggccccaggtgtgaaagcctggtggacatttattcccagctacagcaggaggtaggggcggctggtggggagcttgagcccaagacccgggcatcgctgactggccggctggatgaagtcctgagaaccctcgtcaccaggtattccccgggagctcccagtctggcctagaacagacctcgggaagaaaagaagggggctagagctgtggggagggcaccagcagggacctagcccccaactccccttgtgtcctcctcactcccagttgcttcctggtggagaagcagcccccccaggtactgaagactcagaccaagttccaggctggagttcgattcctgttgggcttgaggttcctgggggccccagccaagcctccgctggtcagggccgacatggtgacagagaagcaggcgcgggagctgagtgtgcctcagggtcctggggctggagcgtaagctgggattggacctggggttggagaagggctgttagggtgatggaggcagcctggagggctggcactgaaaagagcaagggatggggagggagggccatgggatgtggagaccctgaatggtcaaggcagaggaaagggagggacccatttagggctggaatggggtgggggcatcatgatttggccaagatggggactcctcccttaagaacccaaacagagacatggagatttagggctggtgacagtgggtagtctacactcacccatgcactcgccacacctgacgacagtgagatgagctcgttcacactctgacctcccctggcagagaaagcactggagaaatcatcaacaacactgtgcccttggagaacagcattcctgggaactgctgctctgccctgttcaagaacctggtgaggggctttggggtgcagtgaggggggcaccactaggagactgtgggactctccttggagaggatgtcaggaagcccaggaggagcggtctctgtcctcatgacctcgcccttgctctccctcaccccacccacagcttctcaagaagatcaagcggtgtgagcggaagggcactgagtctgtcacagaggagaagtgcgctgtgctcttctctgccagcttcacacttggccccggcaaactccccatccagctccaggtgaaccgtggcccagccctgccccaatctgggaccccgagtcctcctccaatgccacacacaagggccctggaccctcacctcttgtgactgccccataccccatgtgtctgggattcatgcacactggggcccgggtgagtgggggtgagcaagagcatggagtgcacagggcagggaatggtagtggatagcagcaaacacttcggaagcacttcctatagaccagggcactctattaaatgatacatacgcacatgcgtgccagcacacacacgtctggttttcacaataacattatgaggtaggcagtattatcagcctcattttatagataaggacattgagacagagagtttaagtagtttgtcccagtcacacagctaagtgttggagctggtatttgaaacctggaggtctggttccatagcgatgactaataaccacttctctacggtgaggccctgattgagcttcagaacgcatttaataacatggcatgagctttttgattatgatgtgtgagtccaataacttctctgagtgctcagagccagtcccctgaggaaacttcttgcttcactaagaaacccctgtccggctgggcatggtggctcaagcctgtaatcccagcactttgggaggccgaggtgggtagatcacaaggtcaggagttcaagaccagcctggccaatatggtgaaaccccgtctccactaaaaatacaaaaattagctgggcgtggtggtgcaggcctgtagtcccagctgctcgggaggctaagcaggagaatcgcttgaacccaggaggcggaggttgcagtgagccaagattgcgccactgcccttcagcctgggcgacagagcaagactatgtctcaaaaacaaaacaaaacaactcagcactttgggaggccaaggtaggaggatcgcttgagcctgcaagtttaagaccagcctgggctacatagggagatccaatctctacaaaaaataaaaaattggccgggcatggtggctcacgcctgtaatcccagcactttgggaggccaaggcgggcggatcatgaggtcaggaaatcgagaccatcctggctaacacggtgaaacctcgtatctactaaaaatacaaaaaattagccaggcatggtggcgggcgcctgagtcccagctactcgggaggctgaagcaggagaatggcgtgaacctgggagggagagcttgcagtgagccaagatcgcgccactgcactccagcctgagtgacagagcgagactctgtctcaaaaataaataaataaataattagctggattaggtggtacatttctgtagttccagctattcaggaggctgaggtggaaggatcacttgagccctgaaggctgaggctgcagtgagctgagattgcactactgcactccagcctgggcaacagagtgagatactatctaaaaaaaaaaaaaaaaaaaaaaaaaaaaaaaaaaaaaaaaaaaaaaaaaggaaagaaagaaagaaaagaaacccctgtcctcaccctcttcaggccctgtctctgcccctggtggtcatcgtccatggcaaccaagacaacaatgccaaagccactatcctgtgggacaatgccttctctgagatggtgaggaaagtcctggagttggagggaacaggggcagggtgggttctaacatgggcagtggtgcaggcctgctgatggggtggtgggcatgtttaaatgggtgtgaccttaacactttctcatgggcctgctttcgtgcttctgacctcttttcaccccagtcttaacaactatcaggccacagcactgtaacctagaaaaaacagcatgtttgtgagcgatatcaggggctgtggaggggtaggccacaggcaggtgggagggatgaaggccggcccgaggaataacaagacggtagcctgcagtgctctcttcttcccccttctccccaggaccgcgtgccctttgtggtggctgagcgggtgccctgggagaagatgtgtgaaactctgaacctgaagttcatggctgaggtggggaccaaccgggggctgctcccagagcacttcctcttcctggcccagaagatcttcaatgacaacagcctcagtatggaggccttccagcaccgttctgtgtcctggtcgcagttcaacaaggtcattctcctgccctttggacctcccacccccaagctcttcatccctggggcactcagggcctgctcagcctccatgcagggaccttccactggattctccacagtgccccctcaggtcctttaggaaggcctgtcatggaccagggaggaaaaaccccaggcctgggggttggctctggagatgcgttctctgacatccctgaggttttggtctgggggccatctgtccttcctctttaccagtgacttgcatgactcacccaggttgtgtgtaaacagagctctgattcaaagtgactttgacctgttggaaaaatagttcctggccgggcacagcggctcatgcctgtaatcccagtctttgacatgccggggtgggtggatcacctgaggtcaggagtttgagaccagcctggccaacatggtgaaactccatctctactaaaaatacaaaaattagccagttgcggtggcacatgcctgtaatcccagctacatgggaggctgacgcaggagaattgcttgaacccaggaggtggaggttgcagtgagctgagatcataccactgcactcaagcctgggtgacagagcaagactctgtctcaaaaaaaaaaaaaaaaaaaggccaggcatggtggttcatgcctgtaatcccagcactttgggaggccgagacggatagatcacctgaggtcaggagttcgagaccagcctggccaacatggcaaaaccccgtctctactaaaaacaaaaaaatagccaggagtggtcgtttgcgtctgtaatcccagctactcggctgaggcaggaggtgaacccaggaggtagaggctgcagggaagatgaaaccattgcactccagcctgggcaagactctgtatcaaaaaaaaaaaaaaaaaaggctaggtgtggtggctcacacctgtaatcccagcactttgggaggctgaggcgggcggatcacaaggtcaagagatcgagaccatcctgaccaacatggtgaaaccccgtctctactaaaaatacaaaaattacctgggcatggtggcgcatgcctgtagtcccaactactcgggaggctgaggcaggagaatcacttgaacctgggaggcagaggttgcagcgagccaagattgtgccactgcactccagcctgccaacagaatgagattctgtctaaaaaaaaaaagaaagaaagaaagaaagaaaaagaattcctgttgcaaaaactgaacaaaatcccacagggacatgtgcagtaataccagctaccacgtgttgacagcttatatgccaggcgctgtgcttaacaccttatgtatgttatctcacttaatcctcccaacatctctttgaggtagatactattattatccccattttacagatgaggaatctgatgctcagagggttatgtagtttgttcaagttcccaaagcaggtgagtgccatggctaggagagaaccacatatttctgactcttgctcttttattttatgttatattatgttattttatgttttggtttttttttcttttctttctttctttctttctttctttctttctttctttctttctttctctttctttctttctttctttctttctttctttctttctttctttctttctttctttctttctctttctctttctctctttttctttcttttgtgtgagacagaatctttaaagagaagaaagaaatgctcatgtgaccagagggtgtgttagctaaagggagcaagacagtcacacccagcaggttaccttcctttgggcgtcacctctgccacacctccttagggagagggtgtagcatagtagttaagaggggctccagggccagaatgcctgggtttaaatcctagctctgcctcttaccagctatgtagacctgggcaagtcattcgacgtttttggacttccatttcttcatctgtaagatggaattattataatccctacttccatagcctggtaaagagcaaataaatatatggaaaggcttgaaatagtggctggcacgtgtaagcattaggattggtcgttgtcattgatggagtctcaggttcggtctgatcctcagccctgtgattctgtcgtgagggcactcacagctcactgcctgccctaaacaggctccagctctggccctccctcggctcacacctttccccctctccccctaggagatcctgctgggccgtggcttcaccttttggcagtggtttgatggtgtcctggacctcaccaaacgctgtctccggagctactggtctgaccggtgagtccccaccctgggtagtctgagcagccatacaccagtcacctccatactcactgcccatgccccatcctctccttcatcccggccaggctgatcattggcttcatcagcaaacagtacgttactagccttcttctcaatgagcccgacggaacctttctcctccgcttcagcgactcagagattgggggcatcaccattgcccatgtcatccggggccaggatggtgaggccaccccagccagtcctctgtctctgtgcctgtgccctctggggtttcttctgggaatgaaatgtcctgaccttcctgatgccgatcctgatcttcaggaagttcttccagcttctcttcttccttctgtggtctaaatgttcaccttctcactgtgagctctgtgggaacggagactagtgggtctctctccctcaggagccccaccctaggtcctctctcccttgccttggtggagtgagaacaggtcttatggtaggggttggggaaggggaagaaagtccggacagagggatctcagggtctccttcctaccataggctctccacagatagagaacatccagccattctctgccaaagacctgtccattcgctcactgggggaccgaatccgggatcttgctcagctcaaaaatctctatcccaagaagcccaaggatgaggctttccggagccactacaagcgtgagctggaactggcagctctgattccttcctgtcacccacttcctccctgctccccgctgccctcctctccctgcccgcgtgtcatcctgatgtcactccctatttcatagctgtgcttctcttacttccccatgatccatgcccaccttttccacctcccttcctccctaaccccagagcactccatggctgtcttttccttctcacaacagctgaacagatgggtaaggatggcaggggttatgtcccagctaccatcaagatgaccgtggaaaggtgagtgtggtggtatggacagtgggtaggtcaggggcttagtgcttatctgcaggaaggaggggtggcatcaacccttggtcagtcacatgtacctccttccctcctccagggaccaaccacttcctaccccagagctccagatgcctaccatggtgccttcttatgaccttggaatggcccctgattcctccatgagcatgcagcttggcccagatatggtgtaaggagctggaaagacaggaatgggagtggtctgtgcagatgggctaatcttagcatgggcagctgggagagctggcactgggggctgaacagggaatcttcctttccatgagagggacacctgttcaaaagcagggtgtggtggtgtccaggagaagggctggcatcagggggtctgttttctttccccaggccccaggtgtacccaccacactctcactccatccccccgtatcaaggcctctccccagaagaatcagtcaacgtgttgtcagccttccaggagtaagtgaaaaacctcatggggataccatcccactctaagggggtgggcatttgaattgttagaagaggctcttctgtgagaaaggagcagcaaatgctaacagcctgtcttcttctcttctgtccactctaatgagggggtagtagttaagatctggactgcctaggtttgaattctagctccaccacttactggtttggggcaaattacttagcctttggtgccttatctgcacaatgggggataataatgctaataataataacctacctcactgcattattgtggagattaaatgagttcataacacttaaaaagctgagcatagtgcatggctcatagcaaaagctgtgtaagtccagtcgtggatcacttaatgaaggagcattttctgtctttggcagtttcataattatgcgaataccattgagtataattacacaaacctagatggtatagactactatacactgaggctatattgtgtagcctattgatcctagctttaaacccgagcagcatgatactgttctgaatagtataaggaaatagtaacataatggtaaatatttgtgtgataggaattttcagcttgattataattttttttttttgagacagggtctcactcactggagtgcagtggtgcgatcttagctccctgcaacctccgcctcttgggctcgagcaatcctcctgctgtagtgcaccacgacactcggctaattcttttttaagatttttctgcagacaaggtctcacttactgcccaagctggtctcaaactcctgggcttaagtgatcctcccacctcggcctcccaaagcgttaggattacaggcgtgagtcactctgcctggccttgattataatcttatgggaccactgtggtctgtagttgacagaaatgtcgttaatgtggtgcatgactgttattattattttctgtcctgcccctgagagccactgtcacttctctgctgtattggtttttgtttactcatctgttttggccttgaaatggcctagacatttttcttcccgaagtatgacactcgggtgcttattaacttagtcaagacacaacatctcccttcccagaaggtgaggcgggagtgaggacttggggacttaagaactaccaaagttcagagtccaaagaaacattagaaattggctaatccacccccataacacgcacattttacagatgagaagactgagctcagagcatagaaatagcttgcccaggccatgactaagtcaggataaggagctggagcttgtttcctcactcagtggtcctgactttgcaccactctgcatttgcctagcctgccttcctctaactgtgctctccctacttccaggcctcacctgcagatgccccccagcctgggccagatgagcctgccctttgaccagcctcacccccagtgagtgacaaagcccctcctgaccccatgtgcctcttctttcctggccttgccccgctctccttatttccattgctggttcctggcaggggcctgctgccgtgccagcctcaggagcatgctgtgtccagccctgaccccctgctctgctcagatgtgaccatggtggaagacagctgcctgagccagccagtgacagcgtttcctcagggcacttggtgagtggcagcttgggagtggaggctgggtggcatctaggggagtgggcgccatgcctactccactgcttctcccatctccttgcaggattggtgaagacatattccctcctctgctgcctcccactgaacaggacctcactaagcttctcctggaggggcaaggggagtcggggggagggtccttgggggcacagcccctcctgcagccctcccactatgggcaatctgggatctcaatgtcccacatggacctaagggccaaccccagttggtgatcccagctggagggagaacccaaagagacagctcttctactacccccacagacctgctctggacacttgctcatgccctgccaagcagcagatggggagggtgccctcctatccccacctactcctgggtcaggaggaaaagactaacaggagaatgcacagtgggtggagccaatccactccttcctttctatcattcccctgcccacctccttccagcactgactggaagggaagttcaggctctgagacacaccccaacatgcctgcacctgcagcgcgcacacgcacgcacacacacatacagagctctctgagggtgatggggctgagcaggaggggggctgggtaagagcacaggttagggcatggaaggcttctccgcccattctgacccagggcctaggacggataggcaggaacatacagacacatttacactagaggccagggatagaggatattgggtctcagccctaggggaatgggaagcagctcaagggaccctgggtgggagcataggaggggtctggacatgtggttactagtacaggttttgccctgattaaaaaatctcccaaagccccaaattcctgttagccaggtggaggcttctgatacgtgtatgagactatgcaaaagtacaagggctgagattcttcgtgtatagctgtgtgaacgtgtatgtacctaggatatgttaaatgtatagctggcaccttagttgcatgaccacatagaacatgtgtctatctgcttttgcctacgtgacaacacaaatttgggagggtgagacactgcacagaagacagcagcaagtgtgctggcctctctgacatatgctaacccccaaatactctgaatttggagtctgactgtgcccaagtgggtccaagtggctgtgacatctacgtatggctccacacctccaatgctgcctgggagccagggtgagagtctgggtccaggcctggccatgtggccctccagtgtatgagagggccctgcctgctgcatcttttctgttgccccatccaccgccagcttcccttcactcccctatcccattctccctctcaaggcaggggtcatagatcctaagccataaaataaattttattccaaaataacaaaataaataatctactgtacacaatctgaaaagaaa

SEQ ID NO: 12 - protein, 847 aa, Artificial Sequence
  STAT6 Amino Acid
MSLWGLVSKMPPEKVQRLYVDFPQHLRHLLGDWLESQPWEFLVGSDAFCCNLASALLSDTVQHLQASVGEQGEGSTILQHISTLESIYQRDPLKLVATFRQILQGEKKAVMEQFRHLPMPFHWKQEELKFKTGLRRLQHRVGEIHLLREALQKGAEAGQVSLHSLIETPANGTGPSEALAMLLQETTGELEAAKALVLKRIQIWKRQQQLAGNGAPFEESLAPLQERCESLVDIYSQLQQEVGAAGGELEPKTRASLTGRLDEVLRTLVTSCFLVEKQPPQVLKTQTKFQAGVRFLLGLRFLGAPAKPPLVRADMVTEKQARELSVPQGPGAGAESTGEIINNTVPLENSIPGNCCSALFKNLLLKKIKRCERKGTESVTEEKCAVLFSASFTLGPGKLPIQLQALSLPLVVIVHGNQDNNAKATILWDNAFSEMDRVPFVVAERVPWEKMCETLNLKFMAEVGTNRGLLPEHFLFLAQKIFNDNSLSMEAFQHRSVSWSQFNKEILLGRGFTFWQWFDGVLDLTKRCLRSYWSDRLIIGFISKQYVTSLLLNEPDGTFLLRFSDSEIGGITIAHVIRGQDGSPQIENIQPFSAKDLSIRSLGDRIRDLAQLKNLYPKKPKDEAFRSHYKPEQMGKDGRGYVPATIKMTVERDQPLPTPELQMPTMVPSYDLGMAPDSSMSMQLGPDMVPQVYPPHSHSIPPYQGLSPEESVNVLSAFQEPHLQMPPSLGQMSLPFDQPHPQGLLPCQPQEHAVSSPDPLLCSDVTMVEDSCLSQPVTAFPQGTWIGEDIFPPLLPPTEQDLTKLLLEGQGESGGGSLGAQPLLQPSHYGQSGISMSHMDLRANPSW

SEQ ID NO: 13 - DNA, 3963 bp, Artificial Sequence
  STAT6
ggggcagccactgcttacactgaagagggaggacgggagaggagtgtgtgtgtgtgtgtgtgtgtgtgtgtgtatgtatgtgtgtgctttatcttatttttctttttggtggtggtggtggaaggggggaggtgctagcagggccagccttgaactcgctggacagagctacagacctatggggcctggaagtgcccgctgagaaagggagaagacagcagaggggttgccgaggcaacctccaagtcccagatcatgtctctgtggggtctggtctccaagatgcccccagaaaaagtgcagcggctctatgtcgactttccccaacacctgcggcatcttctgggtgactggctggagagccagccctgggagttcctggtcggctccgacgccttctgctgcaacttggctagtgccctactttcagacactgtccagcaccttcaggcctcggtgggagagcagggggaggggagcaccatcttgcaacacatcagcacccttgagagcatatatcagagggaccccctgaagctggtggccactttcagacaaatacttcaaggagagaaaaaagctgttatggaacagttccgccacttgccaatgcctttccactggaagcaggaagaactcaagtttaagacaggcttgcggaggctgcagcaccgagtaggggagatccaccttctccgagaagccctgcagaagggggctgaggctggccaagtgtctctgcacagcttgatagaaactcctgctaatgggactgggccaagtgaggccctggccatgctactgcaggagaccactggagagctagaggcagccaaagccctagtgctgaagaggatccagatttggaaacggcagcagcagctggcagggaatggcgcaccgtttgaggagagcctggccccactccaggagaggtgtgaaagcctggtggacatttattcccagctacagcaggaggtaggggcggctggtggggagcttgagcccaagacccgggcatcgctgactggccggctggatgaagtcctgagaaccctcgtcaccagttgcttcctggtggagaagcagcccccccaggtactgaagactcagaccaagttccaggctggagttcgattcctgttgggcttgaggttcctgggggccccagccaagcctccgctggtcagggccgacatggtgacagagaagcaggcgcgggagctgagtgtgcctcagggtcctggggctggagcagaaagcactggagaaatcatcaacaacactgtgcccttggagaacagcattcctgggaactgctgctctgccctgttcaagaacctgcttctcaagaagatcaagcggtgtgagcggaagggcactgagtctgtcacagaggagaagtgcgctgtgctcttctctgccagcttcacacttggccccggcaaactccccatccagctccaggccctgtctctgcccctggtggtcatcgtccatggcaaccaagacaacaatgccaaagccactatcctgtgggacaatgccttctctgagatggaccgcgtgccctttgtggtggctgagcgggtgccctgggagaagatgtgtgaaactctgaacctgaagttcatggctgaggtggggaccaaccgggggctgctcccagagcacttcctcttcctggcccagaagatcttcaatgacaacagcctcagtatggaggccttccagcaccgttctgtgtcctggtcgcagttcaacaaggagatcctgctgggccgtggcttcaccttttggcagtggtttgatggtgtcctggacctcaccaaacgctgtctccggagctactggtctgaccggctgatcattggcttcatcagcaaacagtacgttactagccttcttctcaatgagcccgacggaacctttctcctccgcttcagcgactcagagattgggggcatcaccattgcccatgtcatccggggccaggatggctctccacagatagagaacatccagccattctctgccaaagacctgtccattcgctcactgggggaccgaatccgggatcttgctcagctcaaaaatctctatcccaagaagcccaaggatgaggctttccggagccactacaagcctgaacagatgggtaaggatggcaggggttatgtcccagctaccatcaagatgaccgtggaaagggaccaaccacttcctaccccagagctccagatgcctaccatggtgccttcttatgaccttggaatggcccctgattcctccatgagcatgcagcttggcccagatatggtgccccaggtgtacccaccacactctcactccatccccccgtatcaaggcctctccccagaagaatcagtcaacgtgttgtcagccttccaggagcctcacctgcagatgccccccagcctgggccagatgagcctgccctttgaccagcctcacccccagggcctgctgccgtgccagcctcaggagcatgctgtgtccagccctgaccccctgctctgctcagatgtgaccatggtggaagacagctgcctgagccagccagtgacagcgtttcctcagggcacttggattggtgaagacatattccctcctctgctgcctcccactgaacaggacctcactaagcttctcctggaggggcaaggggagtcggggggagggtccttgggggcacagcccctcctgcagccctcccactatgggcaatctgggatctcaatgtcccacatggacctaagggccaaccccagttggtgatcccagctggagggagaacccaaagagacagctcttctactacccccacagacctgctctggacacttgctcatgccctgccaagcagcagatggggagggtgccctcctatccccacctactcctgggtcaggaggaaaagactaacaggagaatgcacagtgggtggagccaatccactccttcctttctatcattcccctgcccacctccttccagcactgactggaagggaagttcaggctctgagacacaccccaacatgcctgcacctgcagcgcgcacacgcacgcacacacacatacagagctctctgagggtgatggggctgagcaggaggggggctgggtaagagcacaggttagggcatggaaggcttctccgcccattctgacccagggcctaggacggataggcaggaacatacagacacatttacactagaggccagggatagaggatattgggtctcagccctaggggaatgggaagcagctcaagggaccctgggtgggagcataggaggggtctggacatgtggttactagtacaggttttgccctgattaaaaaatctcccaaagccccaaattcctgttagccaggtggaggcttctgatacgtgtatgagactatgcaaaagtacaagggctgagattcttcgtgtatagctgtgtgaacgtgtatgtacctaggatatgttaaatgtatagctggcaccttagttgcatgaccacatagaacatgtgtctatctgcttttgcctacgtgacaacacaaatttgggagggtgagacactgcacagaagacagcagcaagtgtgctggcctctctgacatatgctaacccccaaatactctgaatttggagtctgactgtgcccaagtgggtccaagtggctgtgacatctacgtatggctccacacctccaatgctgcctgggagccagggtgagagtctgggtccaggcctggccatgtggccctccagtgtatgagagggccctgcctgctgcatcttttctgttgccccatccaccgccagcttcccttcactcccctatcccattctccctctcaaggcaggggtcatagatcctaagccataaaataaattttattccaaaataacaaaataaataatctactgtacacaatctgaaaa

SEQ ID NO: 14 - protein, 673 aa, Artificial Sequence
  STAT6 Iso 2
MEQALAMLLQETTGELEAAKALVLKRIQIWKRQQQLAGNGAPFEESLAPLQERCESLVDIYSQLQQEVGAAGGELEPKTRASLTGRLDEVLRTLVTSCFLVEKQPPQVLKTQTKFQAGVRFLLGLRFLGAPAKPPLVRADMVTEKQARELSVPQGPGAGAESTGEIINNTVPLENSIPGNCCSALFKNLLLKKIKRCERKGTESVTEEKCAVLFSASFTLGPGKLPIQLQALSLPLVVIVHGNQDNNAKATILWDNAFSEMDRVPFVVAERVPWEKMCETLNLKFMAEVGTNRGLLPEHFLFLAQKIFNDNSLSMEAFQHRSVSWSQFNKEILLGRGFTFWQWFDGVLDLTKRCLRSYWSDRLIIGFISKQYVTSLLLNEPDGTFLLRFSDSEIGGITIAHVIRGQDGSPQIENIQPFSAKDLSIRSLGDRIRDLAQLKNLYPKKPKDEAFRSHYKPEQMGKDGRGYVPATIKMTVERDQPLPTPELQMPTMVPSYDLGMAPDSSMSMQLGPDMVPQVYPPHSHSIPPYQGLSPEESVNVLSAFQEPHLQMPPSLGQMSLPFDQPHPQGLLPCQPQEHAVSSPDPLLCSDVTMVEDSCLSQPVTAFPQGTWIGEDIFPPLLPPTEQDLTKLLLEGQGESGGGSLGAQPLLQPSHYGQSGISMSHMDLRANPSW

SEQ ID NO: 15 - protein, 737 aa, Artificial Sequence
  STAT6 Iso 3
MEQFRHLPMPFHWKQEELKFKTGLRRLQHRVGEIHLLREALQKGAEAGQVSLHSLIETPANGTGPSEALAMLLQETTGELEAAKALVLKRIQIWKRQQQLAGNGAPFEESLAPLQERCESLVDIYSQLQQEVGAAGGELEPKTRASLTGRLDEVLRTLVTSCFLVEKQPPQVLKTQTKFQAGVRFLLGLRFLGAPAKPPLVRADMVTEKQARELSVPQGPGAGAESTGEIINNTVPLENSIPGNCCSALFKNLLLKKIKRCERKGTESVTEEKCAVLFSASFTLGPGKLPIQLQALSLPLVVIVHGNQDNNAKATILWDNAFSEMDRVPFVVAERVPWEKMCETLNLKFMAEVGTNRGLLPEHFLFLAQKIFNDNSLSMEAFQHRSVSWSQFNKEILLGRGFTFWQWFDGVLDLTKRCLRSYWSDRLIIGFISKQYVTSLLLNEPDGTFLLRFSDSEIGGITIAHVIRGQDGSPQIENIQPFSAKDLSIRSLGDRIRDLAQLKNLYPKKPKDEAFRSHYKPEQMGKDGRGYVPATIKMTVERDQPLPTPELQMPTMVPSYDLGMAPDSSMSMQLGPDMVPQVYPPHSHSIPPYQGLSPEESVNVLSAFQEPHLQMPPSLGQMSLPFDQPHPQGLLPCQPQEHAVSSPDPLLCSDVTMVEDSCLSQPVTAFPQGTWIGEDIFPPLLPPTEQDLTKLLLEGQGESGGGSLGAQPLLQPSHYGQSGISMSHMDLRANPSW

SEQ ID NO: 16-20 - skipped (5 entries)

SEQ ID NO: 21 - DNA, 2108 bp, Artificial Sequence
  CEBPb
ttactgcccccaaaaggctttgtaaccattctcaaaaaaaagtttattaaaagtgttcttaatgcttgaaacggaaaagattcccaaaatatacagacgcctcttttctcatagaaatagattattttttataatacaaaaaaagaccaaaaaacaaaacaaaacaaaacatcaacagcaacaagcccgtaggaacatctttaagcgattactcagggcccggctgacagttacacgtgggttgcgtcagtcccgtgtacacacgcgttcagccatgtttaaaccgattgcatcaacttcgaaaccggcccgcccgccggcgcctggagaggggcagagggagaagcagagagtttatcattcatctgtacacatagacgtttcttctttaaataacaccacgggcgggagccccatctgcatgtgcggttggtttggacaaaaatatagatatatatatataataaaatattaaaattaccgacgggctccccgcgctgccaagtgccccagtgccaaagttttgccggcgccgccgggggcgggggcgagggcgcgggcgcgggcgctccccggagtctcagccccggccggcagggggacgcgcgcgggggccgcgctagcagtggccggaggaggcgagcaggggctcgggcagctgcttgaacaagttccgcagggtgctgagctcgcgcgacagctgctccaccttcttctgcagccgctcgttctcggccgtgagctccaggaccttgtgctgcgtctccaggttgcgcatcttggccttgtcgcggctcttgcgcacggcgatgttgttgcgctcgcgccggatcttgtactcgtcgctgtgcttgtccacggtcttcttggccttgctcttgacctgcgagggcgccggcgcggcccccgcgtagcaggcggtcgggggcgccttggcgtcagcggggctcggcgtgccgggcgggctggacgaggaggacgtggagaggctcccgctgctgccgctcggcaccgcctggtagccgaggtaagcgcgcagcgcgtacgggaagcccgccgccatgcctgcgccgccgcccggcgccccggcctcctccttccgcttgcagtccgcgggctcgaagcccggctccgccttgagctcggcgggcggcggcggcggcgggggcggtgggtgcaggggcgcgaagcagccggggtgcagcgcgcccttggcggcccccaggcgccccaggctcacgtagccgtactcggccggcttcttgcagttcttgcccccgtagtcgtcggagaagaggtcggagaggaagtcgtggtgctgcccggaggaggcgggcgcgggggcgggcgcgggcggagccgcctcgaaggtgtccgtggccgtggcgggcgccggggcctgcggcgcgcccagcggctccaggtacgggctgaagtcgatggcgcgctcgtggtcgccgatgctgcccagctcgccggcgggggggcgcggcccgggtctggccgcggggggcgccgcgggggccgccttgccgccgtacgcagcagccaagcagtccgcctcgtagtagaagttggccacttccatggatttaaaggcaggcggcggcggcggcagggggagacatgctgggtcccaggccaccaggcgttgcatgaacgcgggtgcccggggagggggcctggggctgcccgctccggccggcccgcaggtggcgcggcctccctgctctgagctgtcgccgctgcgtcgctgctgctgctgccgccgctgccggggtggccgctattagtgagggggctggtggctggaccctcgggtgggtccccttcccagtcccgtgcgcggctctgactcgctaaagtttctcctgagcccggttatttataagggcggcccgtagcaaccgctgcgtcacgccggcccctcccgccgcgccgccgggacgcgaaggacacggccgcggccgcccgagacccccgggaggacggcggcagggcgcagcggagggaccgggcacccggagcgcgttttcggggggcccccgggacgcaggggcggcctcacgccccctgcccacccccgcccggccgccccgggattggga

SEQ ID NO: 22 - protein, 345 aa, Artificial Sequence
  CEBPn Amino Acid
MQRLVAWDPACLPLPPPPPAFKSMEVANFYYEADCLAAAYGGKAAPAAPPAARPGPRPPAGELGSIGDHERAIDFSPYLEPLGAPQAPAPATATDTFEAAPPAPAPAPASSGQHHDFLSDLFSDDYGGKNCKKPAEYGYVSLGRLGAAKGALHPGCFAPLHPPPPPPPPPAELKAEPGFEPADCKRKEEAGAPGGGAGMAAGFPYALRAYLGYQAVPSGSSGSLSTSSSSSPPGTPSPADAKAPPTACYAGAAPAPSQVKSKAKKTVDKHSDEYKIRRERNNIAVRKSRDKAKMRNLETQHKVLELTAENERLQKKVEQLSRELSTLRNLFKQLPEPLLASSGHC

SEQ ID NO: 23 - DNA, 2113 bp, Artificial Sequence
  CEBP NM_005194.3
tcccaatcccggggcggccgggcgggggtgggcagggggcgtgaggccgcccctgcgtcccgggggccccccgaaaacgcgctccgggtgcccggtccctccgctgcgccctgccgccgtcctcccgggggtctcgggcggccgcggccgtgtccttcgcgtcccggcggcgcggcgggaggggccggcgtgacgcagcggttgctacgggccgcccttataaataaccgggctcaggagaaactttagcgagtcagagccgcgcacgggactgggaaggggacccacccgagggtccagccaccagccccctcactaatagcggccaccccggcagcggcggcagcagcagcagcgacgcagcggcgacagctcagagcagggaggccgcgccacctgcgggccggccggagcgggcagccccaggccccctccccgggcacccgcgttcatgcaacgcctggtggcctgggacccagcatgtctccccctgccgccgccgccgcctgcctttaaatccatggaagtggccaacttctactacgaggcggactgcttggctgctgcgtacggcggcaaggcggcccccgcggcgccccccgcggccagacccgggccgcgcccccccgccggcgagctgggcagcatcggcgaccacgagcgcgccatcgacttcagcccgtacctggagccgctgggcgcgccgcaggccccggcgcccgccacggccacggacaccttcgaggcggctccgcccgcgcccgcccccgcgcccgcctcctccgggcagcaccacgacttcctctccgacctcttctccgacgactacgggggcaagaactgcaagaagccggccgagtacggctacgtgagcctggggcgcctgggggccgccaagggcgcgctgcaccccggctgcttcgcgcccctgcacccaccgcccccgccgccgccgccgcccgccgagctcaaggcggagccgggcttcgagcccgcggactgcaagcggaaggaggaggccggggcgccgggcggcggcgcaggcatggcggcgggcttcccgtacgcgctgcgcgcttacctcggctaccaggcggtgccgagcggcagcagcgggagcctctccacgtcctcctcgtccagcccgcccggcacgccgagccccgctgacgccaaggcgcccccgaccgcctgctacgcgggggccgcgccggcgccctcgcaggtcaagagcaaggccaagaagaccgtggacaagcacagcgacgagtacaagatccggcgcgagcgcaacaacatcgccgtgcgcaagagccgcgacaaggccaagatgcgcaacctggagacgcagcacaaggtcctggagctcacggccgagaacgagcggctgcagaagaaggtggagcagctgtcgcgcgagctcagcaccctgcggaacttgttcaagcagctgcccgagcccctgctcgcctcctccggccactgctagcgcggcccccgcgcgcgtccccctgccggccggggctgagactccggggagcgcccgcgcccgcgccctcgcccccgcccccggcggcgccggcaaaactttggcactggggcacttggcagcgcggggagcccgtcggtaattttaatattttattatatatatatatctatatttttgtccaaaccaaccgcacatgcagatggggctcccgcccgtggtgttatttaaagaagaaacgtctatgtgtacagatgaatgataaactctctgcttctccctctgcccctctccaggcgccggcgggcgggccggtttcgaagttgatgcaatcggtttaaacatggctgaacgcgtgtgtacacgggactgacgcaacccacgtgtaactgtcagccgggccctgagtaatcgcttaaagatgttcctacgggcttgttgctgttgatgttttgttttgttttgttttttggtctttttttgtattataaaaaataatctatttctatgagaaaagaggcgtctgtatattttgggaatcttttccgtttcaagcattaagaacacttttaataaacttttttttgagaatggttacaaagccttttgggggcagtaaaaaaa

SEQ ID NO: 24 - protein, 322 aa, Artificial Sequence
  CEBPb Iso 2
MEVANFYYEADCLAAAYGGKAAPAAPPAARPGPRPPAGELGSIGDHERAIDFSPYLEPLGAPQAPAPATATDTFEAAPPAPAPAPASSGQHHDFLSDLFSDDYGGKNCKKPAEYGYVSLGRLGAAKGALHPGCFAPLHPPPPPPPPPAELKAEPGFEPADCKRKEEAGAPGGGAGMAAGFPYALRAYLGYQAVPSGSSGSLSTSSSSSPPGTPSPADAKAPPTACYAGAAPAPSQVKSKAKKTVDKHSDEYKIRRERNNIAVRKSRDKAKMRNLETQHKVLELTAENERLQKKVEQLSRELSTLRNLFKQLPEPLLASSGHC

SEQ ID NO: 25 - protein, 147 aa, Artificial Sequence
  CEBPb Iso 3
MAAGFPYALRAYLGYQAVPSGSSGSLSTSSSSSPPGTPSPADAKAPPTACYAGAAPAPSQVKSKAKKTVDKHSDEYKIRRERNNIAVRKSRDKAKMRNLETQHKVLELTAENERLQKKVEQLSRELSTLRNLFKQLPEPLLASSGHC

SEQ ID NO: 26-30 - skipped (5 entries)

SEQ ID NO: 31 - DNA, 32738 bp, Artificial Sequence
  KRAS G12D genomic sequence
gattttcctaggcggcggccgcggcggcggaggcagcagcggcggcggcagtggcggcggcgaaggtggcggcggctcggccagtactcccggcccccgccatttcggactgggagcgagcgcggcgcaggcactgaaggcggcggcggggccagaggctcagcggctcccaggtgcgggagagaggtacggagcggaccacccctcctgggcccctgcccgggtcccgaccctctttgccggcgccgggcggggccggcggcgagtgaatgaattaggggtccccggaggggcgggtggggggcgcgggcgcggggtcggggcgggctgggtgagaggggtctgcaggggggaggcgcgcggacgcggcggcgcggggagtgaggaatgggcggtgcggggctgaggagggtgaggctggaggcggtcgccgctggtgctgcttcctggacggggaaccccttccttcctcctccccgagagccgcggctggaggcttctggggagaaactcgggccgggccggctgcccctcggagcggtggggtgcggtggaggttactcccgcggcgccccggcctcccctccccctctccccgctcccgcacctcttgcctccctttccagcactcggctgcctcggtccagccttccctgctgcatttggcatctctaggacgaaggtataaacttctccctcgagcgcaggctggacggatagtggtccttttccgtgtgtaggggatgtgtgagtaagaggggaggtcacgttttggaagagcataggaaagtgcttagagaccactgtttgaggttattgtgtttggaaaaaaatgcatctgcctccgagttcctgaatgctcccctcccccatgtatgggctgtgacattgctgtggccacaaaggaggaggtggaggtagagatggtggaagaacaggtggccaacaccctacacgtagagcctgtgacctacagtgaaaaggaaaaagttaatcccagatggtctgttttgcttggtcaagttaaacccgaagaaaacccgcagagcagaagcaaggctttttccttgctagttgagtgtagacagcaatagcaaaaatagtacttgaagtttaatttacctgttcttgtcctttcccctatttcttatgtattaccctcatcccctcgtctcttttatactaccctcattttgcagatgtgttctacatctcaagagttattacagtactccaaaacagcacttacatgattttttaaacttacagaggaattgtagcaatccaccagctaaccgcctgaaatagacttaaacatgtgcatctcctttttttttttttttttgagacacagtctcgctctgttgcccaggctggagtgcaatggcgcggtatcggctcactgaaacctccgcctcctgggttcaagcaattctcctgcctcagcctcccgagtagctgggactagtaggtgcacgccaccatgcccagctaatttttgtatttttagtagagacagagtttcatcatgttggtcaggatggtctccatctgctctgttgcccaggctggagtgcagtggcgccgtctcggctcactgcaacctctgcctcctgcattcaagcaattctcctgcctcagcctcccgaataactgggattacaggtgtctgctgccatgcccggctaattttttgtatttttagtagagacgggggtttcaccatgttggtcaggctggtctagaactcctgacctcgtgatctgcccgcctcggcctcccacagtggcatgtgcatcttatagctgaagtctaagccttcttaaatcttgagatccatcaaaacagacaggttttctaattgttatacaatgtatatgttatgtttataatagaaatcattttacaaataagttataaatgggaaaggtctatttgtaattatcagctcagaattaaccataaaactggtgtcactgaagtgactgaggtccaaaatgctgactctgcatgttatagactacagatatcaaatatggttgctaacaatagtttactttgagactgtagccatccacagtatatttgcttttaagagatggtagatggtaattcagttttatgaaaaataaaaatgaattttcttccattacaaaattgttggattcgagtccagtccactccttactagcttttctaactctcggtgagggatcccctcccagcccatgatcttcatttggtaagactcctttggaacccagttctctctagtggatttaaatgtgatttggttttaaaaatctcattcaaggaattttttttttttctggaaacaaccaccgcataaacaagtaaaccggaagatacatgtggctctgaattcatatatatacacaaactctaatccaatgtctgtccacagtatttcctaggctagtaaactttttggccttaacgacccctctaccctctttgtttttttgagagagagagtctcactctgtcacccaggccggaatgcagtggcgcgatctcggcccgctactacctccgactctcaggctcaagcgattctcccgcctcagcttcccgagtagccgggattacaggctcccgccaccgggctaattgtatttttagatacgggatttcaccatgttggccaggctggtctcgacctcctgacctcaggtgatccgcccgcctaagcctcccaaagtgctgggattacaggccaccacacccggcctacactcttaaaaattatcgaaggggccgggcacattggctcttatctgtaatcccagcactttgggagactgaggcgggaggatcgcttgaggccaggagttggagaccagcgtactcaacatagtgagaccttgttataaagaaaaaaaaaatccaggattaaaaaaaatctttgatttgtttgggatttattaatatttaccgtattggaaattaaaacaattttttaaaatgtattcatttaaaaataataagcccattacttggtaacatgaataaaatattttatgaaaaataactattttccaaaacaaaaccaaaacttagaaaagtggtattgtttcacacttcagtaaatctctttaatgatgtggcttaatagaagatatggattcttatatctgcatctgcattcaatctattatgatcacacatctggaaaacttgtgaaagaatgggagttaaaagggtaaaggacatcttaatgttattatgaaaacagttttgacctcttgcacaccagaaaagtcttagtaacctgaggggttcctagaccacattttgagaactgttttaggctatgcaaactggttggggggaggttggggtaggcagagagctagaagatacattttagtgtaattctcctcatctattcctaattgctttggcctacatttgaaataaagcgtggaggcaaacgggataagatacatgtttgtagtggttgttaacttcaccctagacaagcagccaataagtctaggtagagcagagtaaggcggggaactatgccgtgaccgtgtgtgatacaatttttctagcctgtggtgctttttgcggcagggcttaggagtaaggttagtatgttatcatttgggaaaccaaattattattttgggtcttcagtcaattatgatgctgtgtatatttagtgtttatctacaatatatgcacattcattaatttggagctactcatcctataataaatagttgtgcatttactcccatttttttctgcatttctctccttatttataattatgtgttacatgagggaaaggaggtgaaattaaacattcatattatttcaaaaaatttgaaacaactaactaaaaaatatgttttattttctgtatggtgtttgttatacaatctgtcaatattcatgcacctcttgggagacagtgtatgaaaagcaaagagtaacagtcacatggattactgattactgagatatattcacttgcatctttttttttttttgagacggagtggctctgtcgcccaggctggagtgcagtggcgtgatctcggctcactgcaagctccgcctcctgggttcacgccattcttctgcctcagcctcccaagtagctgggactacaggcgcccgccaccacgcccggctaatttttttatatttttagtagagacggggtttcaccgggttagccaggatggtcttgatctcctgacctcgtgatccaccctcctcggcctcccaaagtgctaggattataggcgtgagccaccgtgcccggctcacttgcatctcttaacagctgttttcttactaaaaacagtgtttatctctaatctttttgtttgtttgtttgttttgagatggagtcttactccgtcacccaatctggagtgcagtggcgtgatctgggctcactgcaacctctgcctcccgggttcaagtgattctccttcctcagcctccccagtagctaggactacaggagagcgccaccacgcctgattaatttttgtatttttagtagagagagggtttcaccatattggccaggctggtcttgaactcctggcctcaggtgatccacccgccttggcctctgaaagtgctgggattacaggcatgagccgccgcacccggctttctaatctttatctttttttgtgcagcggtgatacaggattatgtattgtactgaacagttaattcggagttctcttggtttttagctttattttccccagagatttttttttttttttttttttttgagacggagtcttgctctatcgccaggctggagtgcagtggcgccatctcggctcattgcaacctcggactcctattttccccagagatatttcacacattaaaatgtcgtcaaatattgttcttctttgcctcagtgtttaaatttttatttccccatgacacaatccagctttatttgacactcattctctcaactctcatctgattcttactgttaatatttatccaagagaactactgccatgatgctttaaaagtttttctgtagctgttgcatattgacttctaacacttagaggtgggggtccactaggaaaactgtaacaataagagtggagatagctgtcagcaacttttgtgagggtgtgctacagggtgtagagcactgtgaagtctctacatgagtgaagtcatgatatgatcctttgagagcctttagccgccgcagaacagcagtctggctatttagatagaacaacttgattttaagataaaagaactgtctatgtagcatttatgcatttttcttaagcgtcgatggaggagtttgtaaatgaagtacagttcattacgatacacgtctgcagtcaactggaattttcatgattgaattttgtaaggtattttgaaataatttttcatataaaggtgagtttgtattaaaaggtactggtggagtatttgatagtgtattaaccttatgtgtgacatgttctaatatagtcacattttcattatttttattataaggcctgctgaaaatgactgaatataaacttgtggtagttggagctgatggcgtaggcaagagtgccttgacgatacagctaattcagaatcattttgtggacgaatatgatccaacaatagaggtaaatcttgttttaatatgcatattactggtgcaggaccattctttgatacagataaaggtttctctgaccattttcatgagtacttattacaagataattatgctgaaagttaagttatctgaaatgtaccttgggtttcaagttatatgtaaccattaatatgggaactttactttccttgggagtatgtcagggtccatgatgttcactctctgtgcattttgattggaagtgtatttcagagtttcgtgagagggtagaaatttgtatcctatctggacctaaaagacaatctttttattgtaacttttatttttatgggtttcttggtattgtgacatcatatgtaaaggttagatttaattgtactagtgaaatataattgtttgatggttgatttttttaaacttcatcagcagtattttcctatcttcttctcaacattagagaacctacaactaccggataaattttacaaaatgaattatttgcctaaggtgtggtttatataaaggtactattaccaactttacctttgctttgttgtcatttttaaatttactcaaggaaatactaggatttaaaaaaaaattccttgagtaaatttaaattgttatcatgtttttgaggattattttcagatttttttagtttaatgaaaatttaccaaagtaaagaccagcagcagaatgataagtaaagacctgtaagacaccttgaaggtcatggagtagaacttccatcccaagcagatgaggatttatttaatctcaaagacctccaggaggggacattccccaactgtccttgttaactcattttcagaacatatttattagcatattttacatgtaatttggatcttcatgttaaatttaacatcagtggagatggaaaataagcatatcgccttgtctttgaaatagccctatattgttagattgtttcttaggcttctttaccctgggttaagcagtcctaatactttagcatttattctacatctagtgtactaatttaaaaaaatcagttctgaaaaatttctaagaactttcttcaagttccaagctgtgaaatctagaacaggtcaaagtgccttattaacgtactgtactgtgtagtgtcttgaagagacactttgcgctgaggcaagttctgagggcattgggtggccttgggaagatatttatgcagtttagaacctggagaattgattagataactaatcataaggaaacgtcacatatttttggtactataaaaaagtggagaaataatgcctatttgcaaagatttgatttaaacatagaaacaactttatttggcttccaattttaagaatttacagcagtaaaggggaacagtctaattgaagtagactgcctatgcaatagtctctgtatatttacttttgacaagttaattcaatgtgtactatagttttgtttctttgaagaggtttgaatagtgcacccattttaatctgtattgcaaattcagggttacttggcagactctactatttaaatcagatgtaaaaggaagttttaatataattcactttatgcctgaaagttttcctgggattttggaaggtgattttactggaaatgctgtctgtcttccctgaaaatctgagaaattccattacactttgtttccaatcagaggtcatgagtgctatatgagtatatacagcatgacgtcatgaatgtgataaagtgggttaggaaaccttttgctaatgattgttaaaatgcaatataaatgttgaagaaataaagctaacagttaagcctttatttgggcggaaggctgaaaaagtttataaacttaaacctataactctgcttatgatttctgccaaaccagaagacttgactctgggaagcattggttacctgtgaactttgaaactgacggtccctgacgtagtttagtcacctgggaaaaggtatctgagattatctcttatctcccaagttacagtgagtctctgagggaactgacacattacattaagttcttggtgtagttaaactgtaagaaaggcaggagaacttagtagttaaatagttggttaaatggaaatgctgactccatgttattgtaaaaagttaaaaatttaggaggatatggggatttcactgccattgcaggttttgattggtatttaccaatccgtgtgggtcagagagaaaattagaaaggatatgactgcacattttggaattattagcagtttttctacatttaaaatggaaataaattttttaaaaatttaaatcaagtaatactgtattttttggtgatttagatttttcaaaatttacactaagagatagtaaggagggtggctattgtttctttcaataatgtctctgagaggttgtaactcatctaaggatacgtagctaataagtggtaggatttcaatttaaattctctgagaccaagttaagtagaatttgcactgtactcttgtataactttttaaaactgaaaattagctatctttcaaattaagaaaatatttactaatggagactaattcagatttgtaagtataccaaaatttgaacttagcctgctatctaatggcaacttagtggcagaggtatgatgtaaaatcattcaggtatgacacatagatggagtatgtttgtattcgaggctgtgcacataatcacctttacttgtattgtgaagtatatattgttatcttttatgaagcccactaaagagataatgaaatacctcgttattagggcaagattattgaaaactcaaaatagcccccaaacacaatacttggctagaaatatatacctttatagttcagagatcatttattatcaaaaccctgaagttttttttctaaggtaaaatttggtggaagaggaaaagtctcgttttaaaaaaatgtaggtagttacagagatcagaatgattagttgatcacttaccaaatatatattaagtatctactgtatataatatgctagtaagaataaatatagcaggaagtattttttcccaggctctaattgtttgacatcagcatgcttttattgtggcacttataattcagttcaagtattatgcccctctttgatggaacagtttcctattcagtaaggaagaccagattaatcattggattggtttgtttcatctttagtgttctgagctgtagagtatttatttaccaaggtttattttaatttttattttatttttatttttccatgttcattgtagaattcattttacctacgaatgaagtatgtagattatagagagaaaatttgtaaaattaaactgatactgaagactggtataagaaaagccttatgtaatttgtaagctgctattcttctgagtttatacatatatctttagtaatcaatgagggatggttgggtgactgccctccaggggacatttggcaacatctggagatgtttttggttgccacaacttggggagagagtactgctactggcatctattgagtagatgctattactttaaatggcaaagctgcagttacctttgcaccaacctaatattaaacttcctgcagtgcacgggaaagcccccacaacagggttatctgaccccaaacctcaatggtgttaagatccaaaccttgatatgttaacctgtagctttaaacatcctttaaattgtcaaattcatgtccctgacataaggtttatgttagattttcaagtataacaaagatttaaactttaacttttgtacgttaatgatatgttagcttactccagtcttctattaaaacattctgtttttaaaatcagagacacacagcaattttataaatcatttctcttcaaggctgtgaagctctccccacttttgtgagtgccctctactggtcaaattatttgctttataacaagtaacagtgaaatcctaagtttgtgtagtttcgctgtttaaattatgggtggcatcaatttataaatatattcgttttatttaaaagtcttatatgattgatttcgtatcatttttgctctctgctaatattaatataaagattactgtctgtattagttaggcctaactaagtaggtgagtatagtgaactaagaaaggaaacgaggcagtatataagaaaatagggtggttcagttgttaacacttactgagcttactttgttgaagggactaaaaggcagcagtgtggctctctgagcttctttgcatgcactcaggagctgcttaatggagtccaaggcttggtggtgtgttacaggggatgataggagggtcctattcagaagtggcaaattgtgaaagtgcacattttgtagagttttataggactgtagaatagttgtgagcacctgatttttagaataaacagaaaactcaggtactgtatttaggtcaaattaagaataagtatttattaagacctgaatataaaactttactggtcatggtttttttctaccttgggtttttataaatccaaagatttaaaaacatacaaatggaagttggtaatggaattaagtgaaaggaaaaaatgattttatggtttggaatctcctaagattctggttttaacaatacaactaattccttaatcctagaaatgttcttcactgcccactttgtaccatgcagtcttcctgtgggctagagatacactgaggcgcaaaacagaccagattcctgccttcatggagcttattagttttaggtatctctagatttcttgtaatacctattacaatgcctgcacatcagttcattcatgtgggttcaacgtagtactcagtacatggcaaattcaagttttacttttcggaacttcatggatttttttcctcagaatatcttttatccataattggttgaatctgtagatgcagtacccatggatatggatggcccactttattttgaagagcagtgtttctaggcaatcatgctaattatatatgacttaatttagaggctttatacttaagagcattacatttctggcgtctcttaaccattattatttcataatgtgtaggttatggaacagttaaattattgggatcttaatatagaaattagtagaaataagccagatatggtggctcatgcctgtaatcttagcactttgggaggctgaggctattcgctgtactattttttactacttttctataggtttgaaattttttcaaaataaaacattgaaaaaagtaaggtaggtagtgtgtccctccttaatcctttcaaatattttattttcactatttctattaatttttttttttgtttttgagatggagtctcgctctgttgcccaggctggagtgcagtggcgcgatcttggctcactgcagcctccacctcctgggttccagccattctcctgcctcagcctcctgggtagctggtattacaggcatgcaccaccacacccaattactttttgtatttttagtagagacggggtttcaccatgttggccaggctagtctcgaactcctgacctcgtgatctgcccgcctcagcagtgtcactgcttctagaccgttttcaaggcacagagcttagaaatgcatgttactaagaaatcaagagttaactatttttcaccttctttctcccgcagtgagaaccctggttctaccctgtttctccttgtgtaaattttaatgctaaactatacacttgtgaaataaaaatgataatgtcattcttaaattatggatcttgcagtgttatctaagtaacatagattgagtgatttaactttaggtttccttatttgtggaatttggataaatatttttcacccttgagaaaagtgagactcctttctcatcatcagagtatccttaaaccattaaggcaaacatttgggaaaaaactgagctatctggctgcataaaaattaagttttctttaacaaagatagaagacaaatgaaaacctagaaaaaccatttggttcaagtaacaggaagctatcttatatatgaattagagaaaagcaaacacacaaatagaaaaaaagggatggggggtactaaagatataaatagcttgtctaccaaaaaagaaataaaataaataacatgaacatataaaaagacacttacttcatgaatgtgatgcaagttcaaacaataaataacatttctgtactttcatattggctaaggttaaaatgataactgctaggaagggtatggagaagtgtgcgccttgcactgtagtgggagtatagaccctcagactttatggaggtcagtctggaaatatgtttcaaaatgtaaactacatgtcctttgaccaggtaattcaacttcttgaaatttatccaaggatttaattggataaatgtttaagatgtatatataagaatgtttactgcagtgttgtttatgattttaaaaaaatggaaatcatcttcatgtctaccaatagagaatgggtgaataaattatggtatgtccatatatacaaattacatagttgttggaaatattaggtagatttagatatactgatgttcaaaaatgtccattatgtaagtgaagctgggtcacagcaccttgtgttgagtatgatttcatctagaaacaaaattactccctcatcctttgttgtgttttagttttttaaaataagcttataccattgggctgggggaaaagtaaatactcgttttggagagagaaaagggcactaaagtttcagataccgttagattatttcatgcttatttttcaagcctcaataaattacataattcacatgtagtcttggattaaggaaattgctattaaggctaaataaataatatgagaggtatataatataaaatatgaacattatattggcattaagattggatccacggtcattccagcctctcattcttacctggacttcaagtgatcacttgtgggcaaatgccatctgacttgaacaggttacacatgtatgctcattatatcgttattttcaaaatttgtcatataaattttccttgagttcattcagatttttgaactagttttttctcttgggagtagtacacacttaattctctctagtactaagctaatgttcaccattcttataattttaagtatccagcatttagtaaagaagtctttgttttctttatccttacttttagtgaatgtcttagtttttaattgaaaattctgccatgaaaataagctctttaacatcttcactccctaatcaaaacagaaatccttcatagccttcagttgtagctatccttccctgtgatttgtccagctccattatatttattttgaaatatggtgaccagttttgcaaaattatttcaactgtaggtgcccagtgattttgtaaggagaagatactgtttctgaacagttctcagtagccagtggcctgcccctactttttggcctgcgtgtagtatataaaataatgcagttaactttttatagcacttttcattttataaagagattttcatggtctttaatattaatctatgtataaagtcctgtatgcagttttacctactttcacagctgaaggaacaatagcttagagaagatgtgagataaagtagtttgcccaagcccatagcacaaataagtgaagttcttcggctgtccatggatcgaagactcccaagtctatctctagcctggacttctgtcctgagcaccagacatgtatgtatatcaagatgcctgcaggtcatatccaccaggacaacccatgagtacagggaattcaacatgcccaatatcactcatcttttccttcgccctcccctttgtactcatcccctgtcggtaagctctgttattttaaaaaattgaaatgtattcacatagcatacaatttacacttttcaagtgtacatggtttttagtatattcacaagggttgtgcagtcattactactaattccagaatgttattatcaccccaaaagtcccacatccattagcagccactccccaatcccttctcccaccagcctctaaaaactgctaatttttccatctctgtggatttgtccactctgattatttcatataaagagaatcgtacagacgtggccttttgtgtctggcatcctccacacaggatgatattttcagagttcgtctatgtttttgcttgttgatcattccttcattcctttttctggctgaataatactctgttatatggatataccttattttgtttatctgttcatttgatgggcatttgagtgatttcctctttttggcaattttgaataatgccactataaacatttatgtacacgtttttgtgtgaccatatgttttcacttctctcgggtgtatatctaaggtacagttgctgggttatatggtagctctgtctttgactttttgaggaactgccaagtggttttggtagtgattgtactgtttacattcctaccaacaattttacctaagtatttctcaaatctatttaatcttttcggtccatactgctgttgctgccttagttcagattttgtcatttcttgtaataattcgtagctcatctcccagtctctgctcccctctctccctccctcccccttcttctctctcttatttccacccatttttaacatttatagaagtcaaaagtctagttcagaaagcagaaaccatactagatatttcagcacagagaactaattaggtgttggaagactgaaaggcaaaaaaacactgaagtaacacagtaacatcaagaatgggcactactcctaagattcagggaatgctgggaagatttggggtttatcagaactggaagctcagaggaggggccccttgtcgctgaggcttaatccctgcagaggtgcctttggctgctactggtgaatctgagtgggtatgatgagtcagtgtctgggaagggccaaaacattttgtccctttctataatttgtcatgataatgctagtaatgaatctgatctcccttcctattttaaaaaccttttagtgattttgtataggatgaagtttaaaactccttacttaatatacacatgaccctccgtaagctggcccctgcttgattgtccagtttcacttcttggtgcttattctaaggcctctaagccttagagatcctctaagcctttgagatccccaaaccctggactgcggactggtacccacctgtgtggcctgtgaggaactgggctgcacagccggaaggaggtgagcattacttgccttagctcctgtcagatcggcagcattagattctaataggagcgtgaaccgtgttgtgaactgcccatgcaaggatctaggttgcatactccttaggagaatctaactaatgcttgatggtctgaggtgaaacagtttcatcctgaaatcacccccaactcggtccttggaaaaattgtcttccacgaaactggtccctgatgccggaaaagttggggaccgctgttctaagctaaagttatatggagctccttggttctgtgtcctcaacatgctgttctatgttttttacattctgtttgctccttcctgcttggaatgtccttcccctccccgtctttcttaatgcatacaaagttgatctctcctgtgtgccaccattgtacttcgtcttgcatatggtgttacattcattttattttaattatttatttacgttcatgtctcttccactcaccttagttgcttgaggtcagaaactatataatgtgtgacacggaatgtgacacctagattttcaataagtgtttctatgatacaagggagactgatgtgggtagatgggaatgaactcatcaacctctgtttacataccctaaattccctgtttcttccctattataattctgacagtctacaaccgtctttgatggcttataaacggaaagtgcggaacacatcattctacagtgaatttaaataacctttcggaagagtaacgtaaagtacttgagcattaattgagtaaaagtttctcatcttttcctacaggtgttattaagcagtatgtaaaaagtccttacaatacttaatacattaagaaaacatacaatttcaagaggaaatccccgagtaatacattattgacattttcagcagttctagttatattgagaagagcatctcatggaattggcagaatgaagatggagattaaatgagatgatgtttgtaatatgcttatgacagtatctggcatataagtaagggctcagtaaatgttgactgctgtaattactattaatagtaatatgattacctttagtaaaagttattagtttctttaggttttttgtttactacaatatagtaaacaaaatctatacttggaatgtatatattgttttgttttgatacatggaatatgtctctgtgtcagagtcactgcctgagttggaaaacccatactcgagtatgttaaaaggtgaacacactgaataatttagttattaattataatggaaaaatgacaaacttgatgttctggttaatgaggttatcttatcttgaatgagttagcttttaaattcctcaaaataaaggcatttaataaaccaggaaacacttcattaaaaaaattatgcaagtcagtgtaaaagaagattaaaattccacatgggcaaaggacacacgttggcgataaatatgcagataagaaaaaaaacctatataacattattactcctcaaagaaattggtatgaaaacaataaaaatgtgtagcttatcaaaccaacaaaaatttaaaaatatgaaatccattttaagtaatgataaaatgggtgcactcttagtgctttatagaatagtagtataatgaacctcatgtgtgtaccaaccagctctttcatatcttaacatttagcaacatttgatttagctctttcttttttccaagatagaaaagttaatattgttgaagactcctgcattcttttccctagtcttattttcttccctcccataaatgtgttaaaatctctgtgtgtattgttttggttgtatttttacataaaactttacatattatataaaatttaattgaaggtaaaatttattaaattattcttaatatatattgtaatttaaaaattaacagcttcattgtcttgataaaatttatggtatcttaaacatgtgcttgtttttctaagagaacattgaaacatagattttaaaacaaattgttgaaagattaaaaaatctgcctttgcacactgttacattgaaagtggggcatttgtcgtgaacattcatttcaaatatgtagtatcttcagaatatttgagaaggatttgtattatataattgaaaaatctgttaaattgtatttatgttaactgcttaattctaataaaatttccattcattttttagtatctgcatatatttacatcaaatggattcattcacttatttaagaggcagtactaattacctatagcgttcaagactgttaggtagagggtgtgtagtggtgagtacaacaggcgtgagccctaccaacacggagtttaaagcctagtagaggatatagacttaaacaatttcacaagtaaatacataattacaaattataatacatgctatgaaggaaacataggaggtaccagagaaggaagagtgctttgcatttttatttttaagaccgaagagtgctattggaggactttgagcaagtgaatgacatgatctaacctaccttcgttcattcattcattcattcattttcttccttcctggctcaagcagtcctcccacctgagctccccaaatagctgggactacaggtacacactaccacacctaatttttttttgtattttttgtatttttgatgggattttaccatgttggccaggctggtcttgaactcttgacctcaggtgatccacctgtctcggcctcccaaggtgttgggattataggtgcctagcccatggtgcctagccctaacctacatttataaactatcacttgctgctgtgtggagactatattgtgagattaacagcagggatacctgctaggaagcaattgctgcagattgcctgagacaaaatagttatcatggactagggggatggtggtggtggtggtggtaggtggttggatgtaggatatattttgaagataggtaaatggtgcaagattatgggtcagttttaaatgcttaagtaaattttctttgtaagacattttaggatgccatgttaagaatctctttataactgtcatttaaaaaaaaaccacatattttcttagcataatttcccatagtaacattactatgtcaaaggctatgaacatttgaatgactttagataaatactgtaattgctttccaaaaatattgtgcttattatgtcaccagaaatgtttgaattctgtctacaattcagtcttgccagtatagtacatttcatttagaaaaattttttactatgtagatggaaaaaataatattttagctgggagtggggggactatggggaataactttccttcatttaatattttattgtgagttagtttaagttactttattttatcgtagtttcctaaggctacaaattagtaaccttggtaacttatgtacctaatttaaaagtttacttttttgaaaggctggaaatactaattaaaaacgtaacaccttcatccttgtctttgctccattattaactagtttcattacagaatctctgtgttttaaaatcagatgggttttcataaccagtactttctcagagtggtaaatttaaaaaaatatataaagagaataaataatatttgttgagaatacttcaaataatgtgaagagttattaacttacagcaggagttggcaaacttttctataaagggccatatgggtctttgtcacaaagtcttgggtttttgtttttgtttttttaaacagctatttaactattcctagctaatgggcaatacaaaaacagtgggcaagatttggcctgtgggcagtagcttgctgaaaccttatttagactctaaattttttgaaagagtctacattgatgcatatttttttttcttcctccaaatacagttgacccttgaacaacatgcgtttgagtgaccatgggtccacttgtgatacacgtttttttcccaaccaaatgcagatatggagggctgacttttcatatacctggatgttcctgggccaactgtaggactagaggctgggggggtcttggaaccaatgccgtgtgtataccagggatgactgtttcttatggcctgacctgaagttggaacagaatctttattaatatataatttttgttgcgtttgttttctctttatatttatccattctttttagatcgtatttcatttaacactttttcttctttagtttttaccaagttgcactgaaaatagctcagtgactaattgcacttctaagagtgaggaccctagttaaaattaactctaaaaatactgaatttttaacctaaaccttttatttctaatcaacagtattatttatgagtaggttatagattactttgaaacggaatgtgtctcagaactttgctatcgatatttttaaggtctggtagggaaaagataataggaatgagatttatcagtgaataggggactgctttcccagtttctcggtcgcactggtgtattcaccatggaagcatcttatgaaatatgtacataaactactaatatcccacattacaggttgactattctttatctgaaatgcttaggacctagaagtatttttggattttggtttttcagagtagggatactcagcctacattggtaagtaaagaatgtgaggtgacaggctgggcgcgatggttgacgcctgtaatcccagcactttgggaggccgaggcggatcacctgaggtcaggagttgaagaccagcctggccaatctgtactaaaaatacaaaaattagctggacacagtggcacgtgccagtagtcccagctactcaggaggctgaggtaggagaatcgcttgaacctgggaggcggaggttgcagtgactcgagatcgtgtcactgccctccagcctaggcaacagagcaagactccatctcaaaaaaaaaaaaaaaaaaaaaaaaaaagaatgtgaggtggcagcaataggtaggaagagtctttggtcagctttacatgctctgtagccatgcctgggtaatgggttgactctaagactctgtgctttgctcccacctcctgctttttcattactctttagaatggtttttaatttgtgatctataggagttctttcaagtatttaataagagaataggctaaattaagtaaatgtcaactgaatgctcaaatctctactaaagagcctcttatttagaaaataaatatccatcttttttttctgactggtgagataattaatttttattacagatggtttggaaaataccatatgctttaaaagataagcacaaaattatagtctaatatgtaggttttcatactttaaaaaattgaaaaccaaagaaaaacatttaacatagcatctagtacaaagaaaagagataagcaagagataaatgtcttttttgggacagagttttgctgttgttgcccaggctggagtgcaatggcacaatctcagctcaccgtaacctccacctcccgggttcaagtgattctcctgcctcagcctcccgagtagctgggattacagtcatgcaccaccaggcccaggtaattttgtatgtttagtagagatggggtttctccgtgttggtcaggctgatctcaaactcccgacctcaggtgatctgcccaccttggcctcccaaagtgctgggattacagacatgagccatcgcacccggccaagataaatgtcttttaaattatctccattaaagacataacctttataacattttgatgtatatattaccagtttttaaacacatagtagatttgtataaatacataaacacatattattgtgatcatgctgcacttagacatctttatattctccttatactgtaaacattttgaaatactttactaacaacatttgtaatgaccattctttctctctttctccctctgatagaatggtctacagagtaattcataaactaaacatactttagaggctgggcgcagtggctcatgcctgtaatcccagcactttgagaggctgaggcgtgcagatcacgaggtcaggagttagagaccagcctgactaacatggtgaaaccccatctctactaaaaaaacagtacaaaaattagccgggcgtggtggcgtgcacctagaatcccagctactcaagaggctgaggcaggagaatcactcgagcccaggaggcagaggttgtagtgagccgagattgcaccacagcactccagcctgggcgacagagcgagactccatctcaaaaaaaaaaaaaaaagatacattaatactatagcctacatgtggaacattaagaaaataattgcttttatgtttatgctttatacctgttgttagccctgcttcttatttcatgatttcatggcttcacattgtaacatccctttaccatattttttgaggactgttttggcagaatgtgtgaaatcttgagcagaagtattacccaaaagtcagaagaaaatcagatttttatttcaagattctgttaaagttacccactcccttcttttacttaatcttatagttgcagttctctctctttttagaaaagaaaaaagaggcccctcaggatttgcagatgaaacaatattgctctttagagatatccatctggctgttagattatttttccacagttttcagaagtggatgaggccattagaatcttgagtattgcccatttccttatgtgtgcctttgactatagataaaatagatgcatgacaattatttataagttgattgatttttcttgtcatttaaatcatcttgaataatagagttggtagagctatcccatttttgaaattattttgttttgtcaataactttttgttaccagcatgtacacttgcattgttgactctccatataatacctttaaaaaatttttttttgtggtaaaatatgcataacataaagtttaccatggtagttttctttcatttgttttgtttttgtttttttgagacggagccttgctctgttgccaggctggagtgcagtggagcgatcttggctcactgcaacctccgcctcccgggttcaagcaattcccctgcctcagcctcctgagtagctgggactacaggcgcccgccaccacgcccggctaatattttgtattttaatagagatggggtttcaccatgttggccaggatgttcttgatctcctgacctcatgatccgcccacctcggcctcccaaagtgttgggattgcaagtgtgagccaccgcgcctagaccatggtagttaattttaagtgttcaattcagtgaccttaagtgtgttcataatgttgtgcaaccatcaccatgttgtctaaccattagcactatctgttttgagaacttttttttatcatcccaaattagaattctgtacctgtcaaatagtccccagtaatcctccctcccccagcccctggtaatctgtagtctacttttcgtctttttgaatttgcctattttaggttcctcatataagtggaattatgtggtatttgtccttttgtgttggcttacttcatttagcataatgttttcaaggttcatctgtgttgtagcatgtatatacaggttgaagcatccgttatccaaaatggttgtgaccagaagtggtttggatttcagattttttttttggattttggaatattcatagatacttaactggttcagcatccctcgtccaaaaatccaaaatcagatggagctcagtggctcatgcttgtaatcccaacacgttgggtggccaaggcaggaggatcgcttgagcccaggagttcaaccagcctgagcaacacaagaccctatctctccaaaaaaaaaaaaaaaaaaaaaaagatgaaagaaaaaaaaatccaaaatcaaatgctccagtgagcatttccttttagcatcatgtcaggctctaaaagttacaggttttggagcattttggatttcagatttttggattaacctgcattaatgctcaacctatatgaaattttattcctttttatggctgaataatgttccactgtatgtatatactacattttgtttatccattcatctgttaacagacacttaagttatttccacattttgggtattataaatagtgctgctgcgaacattggtgtacatgtatctgtttgagtccctgtttttagttattttggttatatacctaggaatggaattgctgatcatatggtaattctgtgtttaactttttgaggaactaccactgttttccacaatggcatcaccattttacattcccaccagcaatgcacaaagatttcagtgtctgtatccttgctaacacttattttccattttttgagtttttttgttttgtttttttaataatagccaatcctaatgggtatgtggtagcatctcatggttttgattttattttcctgactattgatgatgttgagcatcttttcaggtgcttagtggccatttgtccgtcatctttggagcaggaacaatgtcttttcaagtcctttgcccatttttaaattgaattttttgttgttgagttgtatataacaccttttttgaagtaaaaggtgcactgtaataatccagactgtgtttctcccttctcaggattcctacaggaagcaagtagtaattgatggagaaacctgtctcttggatattctcgacacagcaggtcaagaggagtacagtgcaatgagggaccagtacatgaggactggggagggctttctttgtgtatttgccataaataatactaaatcatttgaagatattcaccattataggtgggtttaaattgaatataataagctgacattaaggagtaattatagtttttattttttgagtctttgctaatgccatgcatataatatttaataaaaatttttaaataatgtttatgaggtaggtaatatccctgttttataaatgaagttcttgggggattagagcagtggagtaacttgctccagactgcatcggtagtggtggtgctgggattgaaacctaggcctgtttgactccacagccttctgtactcttgactattctacaaaagcaagactttaaactttttagatacatcattaaaaaagaaaaccataaaaaagaatatgaaaagatgatttgagatggtgtcactttaacagtcttaaaagcaatcgtgtgtatagcatagaattgcttggattggataaacagtggcattatatattttaaaaaataaaagttttgaaagattgaagaatttgggcattacagttctcttaaatctgacaaagctgcataaaactattaaaataatcattattatactattttatattctatttctttgagggtttagttttccaaaaactacatattaagcaaatgaatcactcagtggctatgtcatataataacgagttagcctagttataagaagtttaacattttatttaagaacattgttacagcatgtttactgtatagtctagtaatagaggaaaagacatttgggtgggtggtagtggtagtatttttatagaggagttaccaaatttcagctctattatccaagtttacccagctaatggtgttcggaaccgggaatttgagccaattctgactctgttgtctgctctgctccttcttttgtgctgtgtctttgaaagtcacctaaaattgtgagggaatgtaatttcaccccaaatttagagtttatgcacttgttatattgaaaatgattaacatgtagaagggcttttaatggaataagtggtgtagtaacttcagtgttgcctacctagaaatcaaaatctttctagttgtccactttgttttttgaaaaagtaatatgaaaattatgttaatgctttaattcaggtttttgtaaaatattttttatctttacacatttaacatacgtttctaaaattatagtctgttatatagcactttgggtctagaatttttcagtagtttctgttttactattatgatctacctgcatattaacctattaggttatagttttactatacttctaggtatttgatcttttgagagagatacaaggtttctgtttaaaaaggtaaagaaacaaaataactagtagaagaaggaaggaaaatttggtgtagtggaaactaggaattacattgttttctttcagccaaattttatgacaaaagttgtggacaggttttgaaagatatttgtgttactaatgactgtgctataacttttttttctttcccagagaacaaattaaaagagttaaggactctgaagatgtacctatggtcctagtaggaaataaatgtgatttgccttctagaacagtagacacaaaacaggctcaggacttagcaagaagttatggaattccttttattgaaacatcagcaaagacaagacaggtaagtaacactgaaataaatacagatctgttttctgcaaaatcataactgttatgtcatttaatatatcagtttttctctcaattatgctatactaggaaataaaacaatatttagtaaatgtttttgtctcttgagagggcattgcttcttaatccagtgtccatggtactgcttttggctttggtttctttctacattgaaaatttctcttcaattctgagcacatgttaacatttagaattcaagaggtggggatttttttttcccatggttacatatatatatatatatatatatatatatatatatatatatatatatataaagaacagggcaacaaatttttgcgttttctatttcggtagtacttttaaaccattatgtcatgtttctaggttaaacgttgttgtatttgaagaattttactttggcagaatttttttgaggatgtgtttatttctggagaaaggtctcattaaagaaagacaatacccagaaagccaacagaaattctgttactcatttaatgcatttttctgacaaaaattattgccagagagaacctgaattttgtttcaaaaatcatctttgttttaaaaatgactttttcttcaggtaaaataaaataatttcagttgctattatttaacctgtttgtatgaagagtttaacatataggaaatgaatacataaagataggaaggaattaattgttatatgtagtcatatgtctcttaatgacagggatactttctaagaaatacattgttaggtgattttgtcattgtgcaaacatcatagaatatacttacacaaaccttggtagtataacctactatacacctgggatatgtagtatagtctcttgccccagggatacaaacctgtacagtatgtaactgtactaatgactataaggcaattgttaacacaatggtaagttttgtgtgtctaaacctacacttgggctaccctaagtttatatatttttttaaatttctgttcaataataaattaaccttactttactgtaactttttaaactttttaatttttcctaacattttgacttttgtaatacagcttaaaacacacattatacagctatacaaatttttctttccttatatctttattctgtaagcttttttccatatttaaaattttttgtttgtttttacttattaaacttttttgttaaaaactaagacatgcatgcacattaacctaggcctacacagggtcaggaccatcaatatcattgtcttccacttccacatcttgtcccactggaagatcttcaggggcagtaacacacgtggagctgtcatctcctataataacattgccttcttttggaatacctcctgaaggacctatccaaggctgtttatagttaacttttttttttttttttttttttttttagtaaataggaggagtacactataaaataacaatataggtgctataccattatacaactgacagtgcagtaggtttgtttacaccagcatcaccacaaacacgtgagcaatgtgtcgtactacagtgttaggatggctataacatcactaagcaataggaacttttaaactccattataatcttatgggaccactatcacatatgcaatctcctgtggaccaaaatgtcattatgtggtacatgactgtactaagaaattgatccatctatattccatcaatttgtttagggctttttctggttacatttacctgtgagcccagaaaaccagttttgtagaaattaacttctgtaatgctaggagttaaaaaaaattgctgaacaacttttacattgttaaacatttaaaaacaagcgttctagaagtttatcaaatttcataaaggtgcaaaaatgtaaatgtaaatcattatccagctaatatatatgttgtatttccctagtaggagagcatatgtacctcttcctagttatacaaatttgatatatagtaaagaaacagtaaattctacttcaagtcattttgggaggattaaaaactgaatttctctagtttgaccattgtacagatttatctggcaattttactaaaacctgatttataggttaaacttggtgtatatcatatatcactttactttagaggaattaagatttcacataaatccatttccaggttccaaagaccaggaagaggcttggtttttgtttttctttttactgtctttacagtctccttgacttttcttaggagagaaggtactgagaaaacatgattctaatatttattattttttcttccaacattttcttatgaaacattttcaaatacaaaattgagttttatttaaaacatttgcaaatatactacctagattctaccattgttgttttatatttgctttacttacaacttttaaaagatgctttttataccactgaacattttagcttacatttcacaaagaaaagaaaaaatttaagagactttgcataatgttttaaggggttgcagtaaagaagtgcttcttatattttcttatgcatacaaatcagctgggcttattaaaatccagattctaattcagaaggtttaggtggggaccgagtctgcatttctaacaaactcctaggtggtatttttcttggtacttggaccatactttgagtagaaaagcagtagaggacataaaaagagtcttgttagtcccactttgttgctgtccacttctcatttgataatatcctaaaatagctgtgtctcctttttggtggttgtatgattactacctcagaagtactaattgattcttgctatttgaccttaatactttaatataacacagcattcatatttgatcagaaaactatctggcttccttttataagagatttttaggttttatacagttttgtggccttgggtttttttgtttgatttgtttttttgaaggtatataatatgtaagtagataaacaaatttgatttgtagacatttttatgtggatcatctaattaaaaatggagggatacagtatgaaagaatacttgtacttcttaacagagcactcaacctttcttttacatcctgtttcactgatgttattatgtaatttatgttgctaaactataaattagatatttaatttctgttctttgatttccttttattattaaatggacttgttgatttgcctagaaattaatttgcctttcaaaagtcttattaatcttcctccgttgaaattaatttgatatttgcatgcttctggaagactttaaagagctattccgagtaactgtagagattataaaatgaaatatgggaattttaataaattttacatctccagttactggtgaaaatgtcaagtcctcctttctgcagagtattttgttactcatctgttattcagcttatttatttatttatttatttatttatttttctttctttcttgttttttttttttgagacggagtcttgctttgtcgcccaggctggagtacagtggtgggatcttggctcactgcaggctccgcctcccgggttcacaccattcttctgcctcagcctcccaagtagctgggactacaggcacccgccaccatgccttgctaaatttttgtatttttagtagagacgggtttcactgtgttagccaggatggtctcgatctcttgacctcgtgatccacctgcctcggcctcccaaagtgctgggattacaggcatgagccaccgcgcctggcccttatttgttttttaaacaaaattagtgtgcatatccttgttgtattttatcggcaagttgttttatgccctaacttttggggtcttgatcatgagcctaaaacacgtaaacacccaaaaagaattatattccggttaaaggaacaaaacattcatttagaagttctcatccatgtaaatcagaggctggcaaatattttctgtaaagggccaagatagtaaatgttttaggctttgagggccacaagtggtatctgttgcatttttttttaattatgaccctttaaaatgcaaaaatcgttgttagcttgtgcatagtataaaaataggctggccgcatgctgtggctcatgcctgtaatcccagaaatgaggtgggaagccgaggtgggcacaccacctgaggtcaggagttcgaggccagcctggccaacgtggttgaaaccccgtctctactaaaaatacaaaacttagccaggcgtggtggcgggtgcctgttatcctggctactcaaggggctgaggcagtagaattgcttgaacctgagaggcagaggctgtagtgagcccagatcaagccagtgcacaccagcctggacgaccgagcgagactctgtctcaaaaaaaaaaaaaaaaggctgtggctgcatttggtccattggctgtaatatgctgattcctaattctctgggtaactttagtgtttgattagctactagaagttaggttaaacttttgtattttacaggctaactttaataatcttaaagtaaaacttaacatagttcatggaaaggaaatagaaattttaccctagtactcttttttttttttttttttttttttgaggcagagtctccctctgtcacccaggctggagtgcagtggtgggatcttggctgattgcaacctcctcctcctgggttcaagcaattcttgtgcctcagcctcccgagcagctgggactacaggcacgcaccaccacacctgactgatttttgtatttttagtagagacagggtttcgccatgttggccaggctggtcttgaactcctggcatcaagtgatcctcccatctgagcctcccagtgtgctgggattacagacgtgagtcactgtgcctggtctctagtattttttttttttttgagacggtctcactgttgccaggctggagtgcagtggcgcgatcctggctcactgcaacctccgcttcccggattcaagcgattttcctgcctcagcctcctgagtagctgggactatgggtgcacaccaccacgcccagctaatttttgtatttttagtagagacggggtttcaccatgttggccaatatggtctcaatctcttgacctcgtgatctgcccgtctcggcctcccaaagtgctgggattacaggcgtgagccactgtgcccagctgtactttttaagataagaattgcagggtatatatttttaccaacttaataacttataattttaaaaagctaattacttggctagaatataatgcgttacatattctttacactcagttcagtccatatctgaaaggcaaatagaattattttctgctagtacattgtgtagtccctatgttcctagtgtataaggactgttacctagttcacatttatctgggttgttgacagattttcctggtccctttggacagtgcatggccatgttggcaaaagctgtcaaaattgaaacattgacaccatgagaattgtgtgttttccagtctgctaaaatcaaaagtgggagggttcagtaaggtgaataacagaagcagagttttcggggtatctgttactcctcattcggcttttctgctctctgggggtctcaatttaaatataatgtgaaaattagttttacgaacctaaaaatgttgagtgattcatttcctggttttgttgttaatttctagatatttaaattaattgttagaagaaccccgttaaagaatgctttgcaaaacaacctccttatgtgctatgtctctgtttaatagtagttgagtttgtgtacatgagatcaatattttgaactatagctttttatgagttaaaaattgacggaacagttactgtgcacttgctgtgcaccatggtagtctcccaagtagtggtttttctgcatttcaatagtacatgagataggctgtgggtggcaaggtttcttgagaaagtgagggatgcacagttgggttttagaatacatcttgttcctccatgcccttccccaccaaaaggctggtagtcttgcatttgtatatagttagggtatttgatgtgttgcttccttgacagagttttgcaagaatttgcagatttaacaggaacaaaaacttacttaaaacaaaatctcttagtaaaagcatagtctagcaagatttagaatgatactttggctaacagtactttctctatatggagtgctttgtttccatagcctcacaagtatgttttcagataatagttgagttgaaaatgttgtcaatctcttgattttaaaaaatttacatatttaaagttgtatacttttgttcctacgtattttcagttgttcttaaagtttaataagtgacatttgaaaatgagtatatgtgtataaaaacaaaagtaggctaggcacggtggctcatgcctataatcctagcactttgggaggctgaggcaggcggatcacaaggtcaggagtttgagaccagcctgggcaatatggtgaaacccccctctactaaaaatacaaaaattagctgggtgtggtggtgcatgcctgtagtcccagctactcaggaggctgaggcaggagaatcgcttgaacccggaggtggcggttgcagtgagccgagattgcaccactgcagtccagcctgggcggcagagcgagactccatctcaaaaaaaaaaaacaaaaaaagaaaaagttaaaaaaaaacaaaaaacccccacaaaatgagtatatgtggcaacaagtcctattctcaaaaaaattattgtgtgctagttaagagcttaatgagtagccagtcggtattaaatatctgtttcagctatattttatctttaaaaattatctacagattttggaatgtgaaaaactagtgttttgtttcataggtatatactgtaggcattttaaaaataagagccagtgccagtggtttacagtgtacacaaggataatgttctcatgttctcttgatgtcagtatgactttaaagcatattatcaagaaataactaagtctgaaaaactgtggtaaataactggtactctaaaacctaagtttcttattactaaaaataagaaatggtaaaagtcaccctgtgctgttaattatatgagccactgaggtcctgacactgaattcttggtggtggataataatctcttctttttaattattggcttccaattctctctgcattgctggaaacaaaaatcatatatttcactattggtggtggggatgctgtcactgaaaaagtagacacattcatattgattttagaaataagttaaaatcaaaatttgcttctgctaaattagtagaggaccaatactgtttttctccttcatagtatgttttggtacttctacattgacattataacttttttttttttaaacagaaatagaagtttacattcttagaa

SEQ ID NO: 32 - protein, 188 aa, Artificial Sequence [sequence omitted]

SEQ ID NO: 33 - DNA, 5306 bp, Artificial Sequence
  KRAS G12D mRNA
ctaggcggcggccgcggcggcggaggcagcagcggcggcggcagtggcggcggcgaaggtggcggcggctcggccagtactcccggcccccgccatttcggactgggagcgagcgcggcgcaggcactgaaggcggcggcggggccagaggctcagcggctcccaggtgcgggagagaggcctgctgaaaatgactgaatataaacttgtggtagttggagctgatggcgtaggcaagagtgccttgacgatacagctaattcagaatcattttgtggacgaatatgatccaacaatagaggattcctacaggaagcaagtagtaattgatggagaaacctgtctcttggatattctcgacacagcaggtcaagaggagtacagtgcaatgagggaccagtacatgaggactggggagggctttctttgtgtatttgccataaataatactaaatcatttgaagatattcaccattatagagaacaaattaaaagagttaaggactctgaagatgtacctatggtcctagtaggaaataaatgtgatttgccttctagaacagtagacacaaaacaggctcaggacttagcaagaagttatggaattccttttattgaaacatcagcaaagacaagacagggtgttgatgatgccttctatacattagttcgagaaattcgaaaacataaagaaaagatgagcaaagatggtaaaaagaagaaaaagaagtcaaagacaaagtgtgtaattatgtaaatacaatttgtacttttttcttaaggcatactagtacaagtggtaatttttgtacattacactaaattattagcatttgttttagcattacctaatttttttcctgctccatgcagactgttagcttttaccttaaatgcttattttaaaatgacagtggaagtttttttttcctctaagtgccagtattcccagagttttggtttttgaactagcaatgcctgtgaaaaagaaactgaatacctaagatttctgtcttggggcttttggtgcatgcagttgattacttcttatttttcttaccaattgtgaatgttggtgtgaaacaaattaatgaagcttttgaatcatccctattctgtgttttatctagtcacataaatggattaattactaatttcagttgagaccttctaattggtttttactgaaacattgagggaacacaaatttatgggcttcctgatgatgattcttctaggcatcatgtcctatagtttgtcatccctgatgaatgtaaagttacactgttcacaaaggttttgtctcctttccactgctattagtcatggtcactctccccaaaatattatattttttctataaaaagaaaaaaatggaaaaaaattacaaggcaatggaaactattataaggccatttccttttcacattagataaattactataaagactcctaatagcttttcctgttaaggcagacccagtatgaaatggggattattatagcaaccattttggggctatatttacatgctactaaatttttataataattgaaaagattttaacaagtataaaaaattctcataggaattaaatgtagtctccctgtgtcagactgctctttcatagtataactttaaatcttttcttcaacttgagtctttgaagatagttttaattctgcttgtgacattaaaagattatttgggccagttatagcttattaggtgttgaagagaccaaggttgcaaggccaggccctgtgtgaacctttgagctttcatagagagtttcacagcatggactgtgtccccacggtcatccagtgttgtcatgcattggttagtcaaaatggggagggactagggcagtttggatagctcaacaagatacaatctcactctgtggtggtcctgctgacaaatcaagagcattgcttttgtttcttaagaaaacaaactcttttttaaaaattacttttaaatattaactcaaaagttgagattttggggtggtggtgtgccaagacattaattttttttttaaacaatgaagtgaaaaagttttacaatctctaggtttggctagttctcttaacactggttaaattaacattgcataaacacttttcaagtctgatccatatttaataatgctttaaaataaaaataaaaacaatccttttgataaatttaaaatgttacttattttaaaataaatgaagtgagatggcatggtgaggtgaaagtatcactggactaggaagaaggtgacttaggttctagataggtgtcttttaggactctgattttgaggacatcacttactatccatttcttcatgttaaaagaagtcatctcaaactcttagttttttttttttacaactatgtaatttatattccatttacataaggatacacttatttgtcaagctcagcacaatctgtaaatttttaacctatgttacaccatcttcagtgccagtcttgggcaaaattgtgcaagaggtgaagtttatatttgaatatccattctcgttttaggactcttcttccatattagtgtcatcttgcctccctaccttccacatgccccatgacttgatgcagttttaatacttgtaattcccctaaccataagatttactgctgctgtggatatctccatgaagttttcccactgagtcacatcagaaatgccctacatcttatttcctcagggctcaagagaatctgacagataccataaagggatttgacctaatcactaattttcaggtggtggctgatgctttgaacatctctttgctgcccaatccattagcgacagtaggatttttcaaacctggtatgaatagacagaaccctatccagtggaaggagaatttaataaagatagtgctgaaagaattccttaggtaatctataactaggactactcctggtaacagtaatacattccattgttttagtaaccagaaatcttcatgcaatgaaaaatactttaattcatgaagcttactttttttttttggtgtcagagtctcgctcttgtcacccaggctggaatgcagtggcgccatctcagctcactgcaacctccatctcccaggttcaagcgattctcgtgcctcggcctcctgagtagctgggattacaggcgtgtgccactacactcaactaatttttgtatttttaggagagacggggtttcaccctgttggccaggctggtctcgaactcctgacctcaagtgattcacccaccttggcctcataaacctgttttgcagaactcatttattcagcaaatatttattgagtgcctaccagatgccagtcaccacacaaggcactgggtatatggtatccccaaacaagagacataatcccggtccttaggtagtgctagtgtggtctgtaatatcttactaaggcctttggtatacgacccagagataacacgatgcgtattttagttttgcaaagaaggggtttggtctctgtgccagctctataattgttttgctacgattccactgaaactcttcgatcaagctactttatgtaaatcacttcattgttttaaaggaataaacttgattatattgtttttttatttggcataactgtgattcttttaggacaattactgtacacattaaggtgtatgtcagatattcatattgacccaaatgtgtaatattccagttttctctgcataagtaattaaaatatacttaaaaattaatagttttatctgggtacaaataaacaggtgcctgaactagttcacagacaaggaaacttctatgtaaaaatcactatgatttctgaattgctatgtgaaactacagatctttggaacactgtttaggtagggtgttaagacttacacagtacctcgtttctacacagagaaagaaatggccatacttcaggaactgcagtgcttatgaggggatatttaggcctcttgaatttttgatgtagatgggcatttttttaaggtagtggttaattacctttatgtgaactttgaatggtttaacaaaagatttgtttttgtagagattttaaagggggagaattctagaaataaatgttacctaattattacagccttaaagacaaaaatccttgttgaagtttttttaaaaaaagctaaattacatagacttaggcattaacatgtttgtggaagaatatagcagacgtatattgtatcatttgagtgaatgttcccaagtaggcattctaggctctatttaactgagtcacactgcataggaatttagaacctaacttttataggttatcaaaactgttgtcaccattgcacaattttgtcctaatatatacatagaaactttgtggggcatgttaagttacagtttgcacaagttcatctcatttgtattccattgattttttttttcttctaaacattttttcttcaaacagtatataactttttttaggggatttttttttagacagcaaaaactatctgaagatttccatttgtcaaaaagtaatgatttcttgataattgtgtagtaatgttttttagaacccagcagttaccttaaagctgaatttatatttagtaacttctgtgttaatactggatagcatgaattctgcattgagaaactgaatagctgtcataaaatgaaactttctttctaaagaaagatactcacatgagttcttgaagaatagtcataactagattaagatctgtgttttagtttaatagtttgaagtgcctgtttgggataatgataggtaatttagatgaatttaggggaaaaaaaagttatctgcagatatgttgagggcccatctctccccccacacccccacagagctaactgggttacagtgttttatccgaaagtttccaattccactgtcttgtgttttcatgttgaaaatacttttgcatttttcctttgagtgccaatttcttactagtactatttcttaatgtaacatgtttacctggaatgtattttaactatttttgtatagtgtaaactgaaacatgcacattttgtacattgtgctttcttttgtgggacatatgcagtgtgatccagttgttttccatcatttggttgcgctgacctaggaatgttggtcatatcaaacattaaaaatgaccactcttttaattgaaattaacttttaaatgtttataggagtatgtgctgtgaagtgatctaaaatttgtaatatttttgtcatgaactgtactactcctaattattgtaatgtaataaaaatagttacagtgac

SEQ ID NO: 34 - protein, 189 aa, Artificial Sequence
  KRAS G12D protein Isoform A
MTEYKLVVVGADGVGKSALTIQLIQNHFVDEYDPTIEDSYRKQVVIDGETCLLDILDTAGQEEYSAMRDQYMRTGEGFLCVFAINNTKSFEDIHHYREQIKRVKDSEDVPMVLVGNKCDLPSRTVDTKQAQDLARSYGIPFIETSAKTRQRVEDAFYTLVREIRQYRLKKISKEEKTPGCVKIKKCIIM

SEQ ID NO: 35 - DNA, 32738 bp, Artificial Sequence
  Genomic Sequence for KRAS (WT)
gattttcctaggcggcggccgcggcggcggaggcagcagcggcggcggcagtggcggcggcgaaggtggcggcggctcggccagtactcccggcccccgccatttcggactgggagcgagcgcggcgcaggcactgaaggcggcggcggggccagaggctcagcggctcccaggtgcgggagagaggtacggagcggaccacccctcctgggcccctgcccgggtcccgaccctctttgccggcgccgggcggggccggcggcgagtgaatgaattaggggtccccggaggggcgggtggggggcgcgggcgcggggtcggggcgggctgggtgagaggggtctgcaggggggaggcgcgcggacgcggcggcgcggggagtgaggaatgggcggtgcggggctgaggagggtgaggctggaggcggtcgccgctggtgctgcttcctggacggggaaccccttccttcctcctccccgagagccgcggctggaggcttctggggagaaactcgggccgggccggctgcccctcggagcggtggggtgcggtggaggttactcccgcggcgccccggcctcccctccccctctccccgctcccgcacctcttgcctccctttccagcactcggctgcctcggtccagccttccctgctgcatttggcatctctaggacgaaggtataaacttctccctcgagcgcaggctggacggatagtggtccttttccgtgtgtaggggatgtgtgagtaagaggggaggtcacgttttggaagagcataggaaagtgcttagagaccactgtttgaggttattgtgtttggaaaaaaatgcatctgcctccgagttcctgaatgctcccctcccccatgtatgggctgtgacattgctgtggccacaaaggaggaggtggaggtagagatggtggaagaacaggtggccaacaccctacacgtagagcctgtgacctacagtgaaaaggaaaaagttaatcccagatggtctgttttgcttggtcaagttaaacccgaagaaaacccgcagagcagaagcaaggctttttccttgctagttgagtgtagacagcaatagcaaaaatagtacttgaagtttaatttacctgttcttgtcctttcccctatttcttatgtattaccctcatcccctcgtctcttttatactaccctcattttgcagatgtgttctacatctcaagagttattacagtactccaaaacagcacttacatgattttttaaacttacagaggaattgtagcaatccaccagctaaccgcctgaaatagacttaaacatgtgcatctcctttttttttttttttttgagacacagtctcgctctgttgcccaggctggagtgcaatggcgcggtatcggctcactgaaacctccgcctcctgggttcaagcaattctcctgcctcagcctcccgagtagctgggactagtaggtgcacgccaccatgcccagctaatttttgtatttttagtagagacagagtttcatcatgttggtcaggatggtctccatctgctctgttgcccaggctggagtgcagtggcgccgtctcggctcactgcaacctctgcctcctgcattcaagcaattctcctgcctcagcctcccgaataactgggattacaggtgtctgctgccatgcccggctaattttttgtatttttagtagagacgggggtttcaccatgttggtcaggctggtctagaactcctgacctcgtgatctgcccgcctcggcctcccacagtggcatgtgcatcttatagctgaagtctaagccttcttaaatcttgagatccatcaaaacagacaggttttctaattgttatacaatgtatatgttatgtttataatagaaatcattttacaaataagttataaatgggaaaggtctatttgtaattatcagctcagaattaaccataaaactggtgtcactgaagtgactgaggtccaaaatgctgactctgcatgttatagactacagatatcaaatatggttgctaacaatagtttactttgagactgtagccatccacagtatatttgcttttaagagatggtagatggtaattcagttttatgaaaaataaaaatgaattttcttccattacaaaattgttggattcgagtccagtccactccttactagcttttctaactctcggtgagggatcccctcccagcccatgatcttcatttggtaagactcctttggaacccagttctctctagtggatttaaatgtgatttggttttaaaaatctcattcaaggaattttttttttttctggaaacaaccaccgcataaacaagtaaaccggaagatacatgtggctctgaattcatatatatacacaaactctaatccaatgtctgtccacagtatttcctaggctagtaaactttttggccttaacgacccctctaccctctttgtttttttgagagagagagtctcactctgtcacccaggccggaatgcagtggcgcgatctcggcccgctactacctccgactctcaggctcaagcgattctcccgcctcagcttcccgagtagccgggattacaggctcccgccaccgggctaattgtatttttagatacgggatttcaccatgttggccaggctggtctcgacctcctgacctcaggtgatccgcccgcctaagcctcccaaagtgctgggattacaggccaccacacccggcctacactcttaaaaattatcgaaggggccgggcacattggctcttatctgtaatcccagcactttgggagactgaggcgggaggatcgcttgaggccaggagttggagaccagcgtactcaacatagtgagaccttgttataaagaaaaaaaaaatccaggattaaaaaaaatctttgatttgtttgggatttattaatatttaccgtattggaaattaaaacaattttttaaaatgtattcatttaaaaataataagcccattacttggtaacatgaataaaatattttatgaaaaataactattttccaaaacaaaaccaaaacttagaaaagtggtattgtttcacacttcagtaaatctctttaatgatgtggcttaatagaagatatggattcttatatctgcatctgcattcaatctattatgatcacacatctggaaaacttgtgaaagaatgggagttaaaagggtaaaggacatcttaatgttattatgaaaacagttttgacctcttgcacaccagaaaagtcttagtaacctgaggggttcctagaccacattttgagaactgttttaggctatgcaaactggttggggggaggttggggtaggcagagagctagaagatacattttagtgtaattctcctcatctattcctaattgctttggcctacatttgaaataaagcgtggaggcaaacgggataagatacatgtttgtagtggttgttaacttcaccctagacaagcagccaataagtctaggtagagcagagtaaggcggggaactatgccgtgaccgtgtgtgatacaatttttctagcctgtggtgctttttgcggcagggcttaggagtaaggttagtatgttatcatttgggaaaccaaattattattttgggtcttcagtcaattatgatgctgtgtatatttagtgtttatctacaatatatgcacattcattaatttggagctactcatcctataataaatagttgtgcatttactcccatttttttctgcatttctctccttatttataattatgtgttacatgagggaaaggaggtgaaattaaacattcatattatttcaaaaaatttgaaacaactaactaaaaaatatgttttattttctgtatggtgtttgttatacaatctgtcaatattcatgcacctcttgggagacagtgtatgaaaagcaaagagtaacagtcacatggattactgattactgagatatattcacttgcatctttttttttttttgagacggagtggctctgtcgcccaggctggagtgcagtggcgtgatctcggctcactgcaagctccgcctcctgggttcacgccattcttctgcctcagcctcccaagtagctgggactacaggcgcccgccaccacgcccggctaatttttttatatttttagtagagacggggtttcaccgggttagccaggatggtcttgatctcctgacctcgtgatccaccctcctcggcctcccaaagtgctaggattataggcgtgagccaccgtgcccggctcacttgcatctcttaacagctgttttcttactaaaaacagtgtttatctctaatctttttgtttgtttgtttgttttgagatggagtcttactccgtcacccaatctggagtgcagtggcgtgatctgggctcactgcaacctctgcctcccgggttcaagtgattctccttcctcagcctccccagtagctaggactacaggagagcgccaccacgcctgattaatttttgtatttttagtagagagagggtttcaccatattggccaggctggtcttgaactcctggcctcaggtgatccacccgccttggcctctgaaagtgctgggattacaggcatgagccgccgcacccggctttctaatctttatctttttttgtgcagcggtgatacaggattatgtattgtactgaacagttaattcggagttctcttggtttttagctttattttccccagagatttttttttttttttttttttttgagacggagtcttgctctatcgccaggctggagtgcagtggcgccatctcggctcattgcaacctcggactcctattttccccagagatatttcacacattaaaatgtcgtcaaatattgttcttctttgcctcagtgtttaaatttttatttccccatgacacaatccagctttatttgacactcattctctcaactctcatctgattcttactgttaatatttatccaagagaactactgccatgatgctttaaaagtttttctgtagctgttgcatattgacttctaacacttagaggtgggggtccactaggaaaactgtaacaataagagtggagatagctgtcagcaacttttgtgagggtgtgctacagggtgtagagcactgtgaagtctctacatgagtgaagtcatgatatgatcctttgagagcctttagccgccgcagaacagcagtctggctatttagatagaacaacttgattttaagataaaagaactgtctatgtagcatttatgcatttttcttaagcgtcgatggaggagtttgtaaatgaagtacagttcattacgatacacgtctgcagtcaactggaattttcatgattgaattttgtaaggtattttgaaataatttttcatataaaggtgagtttgtattaaaaggtactggtggagtatttgatagtgtattaaccttatgtgtgacatgttctaatatagtcacattttcattatttttattataaggcctgctgaaaatgactgaatataaacttgtggtagttggagctggtggcgtaggcaagagtgccttgacgatacagctaattcagaatcattttgtggacgaatatgatccaacaatagaggtaaatcttgttttaatatgcatattactggtgcaggaccattctttgatacagataaaggtttctctgaccattttcatgagtacttattacaagataattatgctgaaagttaagttatctgaaatgtaccttgggtttcaagttatatgtaaccattaatatgggaactttactttccttgggagtatgtcagggtccatgatgttcactctctgtgcattttgattggaagtgtatttcagagtttcgtgagagggtagaaatttgtatcctatctggacctaaaagacaatctttttattgtaacttttatttttatgggtttcttggtattgtgacatcatatgtaaaggttagatttaattgtactagtgaaatataattgtttgatggttgatttttttaaacttcatcagcagtattttcctatcttcttctcaacattagagaacctacaactaccggataaattttacaaaatgaattatttgcctaaggtgtggtttatataaaggtactattaccaactttacctttgctttgttgtcatttttaaatttactcaaggaaatactaggatttaaaaaaaaattccttgagtaaatttaaattgttatcatgtttttgaggattattttcagatttttttagtttaatgaaaatttaccaaagtaaagaccagcagcagaatgataagtaaagacctgtaagacaccttgaaggtcatggagtagaacttccatcccaagcagatgaggatttatttaatctcaaagacctccaggaggggacattccccaactgtccttgttaactcattttcagaacatatttattagcatattttacatgtaatttggatcttcatgttaaatttaacatcagtggagatggaaaataagcatatcgccttgtctttgaaatagccctatattgttagattgtttcttaggcttctttaccctgggttaagcagtcctaatactttagcatttattctacatctagtgtactaatttaaaaaaatcagttctgaaaaatttctaagaactttcttcaagttccaagctgtgaaatctagaacaggtcaaagtgccttattaacgtactgtactgtgtagtgtcttgaagagacactttgcgctgaggcaagttctgagggcattgggtggccttgggaagatatttatgcagtttagaacctggagaattgattagataactaatcataaggaaacgtcacatatttttggtactataaaaaagtggagaaataatgcctatttgcaaagatttgatttaaacatagaaacaactttatttggcttccaattttaagaatttacagcagtaaaggggaacagtctaattgaagtagactgcctatgcaatagtctctgtatatttacttttgacaagttaattcaatgtgtactatagttttgtttctttgaagaggtttgaatagtgcacccattttaatctgtattgcaaattcagggttacttggcagactctactatttaaatcagatgtaaaaggaagttttaatataattcactttatgcctgaaagttttcctgggattttggaaggtgattttactggaaatgctgtctgtcttccctgaaaatctgagaaattccattacactttgtttccaatcagaggtcatgagtgctatatgagtatatacagcatgacgtcatgaatgtgataaagtgggttaggaaaccttttgctaatgattgttaaaatgcaatataaatgttgaagaaataaagctaacagttaagcctttatttgggcggaaggctgaaaaagtttataaacttaaacctataactctgcttatgatttctgccaaaccagaagacttgactctgggaagcattggttacctgtgaactttgaaactgacggtccctgacgtagtttagtcacctgggaaaaggtatctgagattatctcttatctcccaagttacagtgagtctctgagggaactgacacattacattaagttcttggtgtagttaaactgtaagaaaggcaggagaacttagtagttaaatagttggttaaatggaaatgctgactccatgttattgtaaaaagttaaaaatttaggaggatatggggatttcactgccattgcaggttttgattggtatttaccaatccgtgtgggtcagagagaaaattagaaaggatatgactgcacattttggaattattagcagtttttctacatttaaaatggaaataaattttttaaaaatttaaatcaagtaatactgtattttttggtgatttagatttttcaaaatttacactaagagatagtaaggagggtggctattgtttctttcaataatgtctctgagaggttgtaactcatctaaggatacgtagctaataagtggtaggatttcaatttaaattctctgagaccaagttaagtagaatttgcactgtactcttgtataactttttaaaactgaaaattagctatctttcaaattaagaaaatatttactaatggagactaattcagatttgtaagtataccaaaatttgaacttagcctgctatctaatggcaacttagtggcagaggtatgatgtaaaatcattcaggtatgacacatagatggagtatgtttgtattcgaggctgtgcacataatcacctttacttgtattgtgaagtatatattgttatcttttatgaagcccactaaagagataatgaaatacctcgttattagggcaagattattgaaaactcaaaatagcccccaaacacaatacttggctagaaatatatacctttatagttcagagatcatttattatcaaaaccctgaagttttttttctaaggtaaaatttggtggaagaggaaaagtctcgttttaaaaaaatgtaggtagttacagagatcagaatgattagttgatcacttaccaaatatatattaagtatctactgtatataatatgctagtaagaataaatatagcaggaagtattttttcccaggctctaattgtttgacatcagcatgcttttattgtggcacttataattcagttcaagtattatgcccctctttgatggaacagtttcctattcagtaaggaagaccagattaatcattggattggtttgtttcatctttagtgttctgagctgtagagtatttatttaccaaggtttattttaatttttattttatttttatttttccatgttcattgtagaattcattttacctacgaatgaagtatgtagattatagagagaaaatttgtaaaattaaactgatactgaagactggtataagaaaagccttatgtaatttgtaagctgctattcttctgagtttatacatatatctttagtaatcaatgagggatggttgggtgactgccctccaggggacatttggcaacatctggagatgtttttggttgccacaacttggggagagagtactgctactggcatctattgagtagatgctattactttaaatggcaaagctgcagttacctttgcaccaacctaatattaaacttcctgcagtgcacgggaaagcccccacaacagggttatctgaccccaaacctcaatggtgttaagatccaaaccttgatatgttaacctgtagctttaaacatcctttaaattgtcaaattcatgtccctgacataaggtttatgttagattttcaagtataacaaagatttaaactttaacttttgtacgttaatgatatgttagcttactccagtcttctattaaaacattctgtttttaaaatcagagacacacagcaattttataaatcatttctcttcaaggctgtgaagctctccccacttttgtgagtgccctctactggtcaaattatttgctttataacaagtaacagtgaaatcctaagtttgtgtagtttcgctgtttaaattatgggtggcatcaatttataaatatattcgttttatttaaaagtcttatatgattgatttcgtatcatttttgctctctgctaatattaatataaagattactgtctgtattagttaggcctaactaagtaggtgagtatagtgaactaagaaaggaaacgaggcagtatataagaaaatagggtggttcagttgttaacacttactgagcttactttgttgaagggactaaaaggcagcagtgtggctctctgagcttctttgcatgcactcaggagctgcttaatggagtccaaggcttggtggtgtgttacaggggatgataggagggtcctattcagaagtggcaaattgtgaaagtgcacattttgtagagttttataggactgtagaatagttgtgagcacctgatttttagaataaacagaaaactcaggtactgtatttaggtcaaattaagaataagtatttattaagacctgaatataaaactttactggtcatggtttttttctaccttgggtttttataaatccaaagatttaaaaacatacaaatggaagttggtaatggaattaagtgaaaggaaaaaatgattttatggtttggaatctcctaagattctggttttaacaatacaactaattccttaatcctagaaatgttcttcactgcccactttgtaccatgcagtcttcctgtgggctagagatacactgaggcgcaaaacagaccagattcctgccttcatggagcttattagttttaggtatctctagatttcttgtaatacctattacaatgcctgcacatcagttcattcatgtgggttcaacgtagtactcagtacatggcaaattcaagttttacttttcggaacttcatggatttttttcctcagaatatcttttatccataattggttgaatctgtagatgcagtacccatggatatggatggcccactttattttgaagagcagtgtttctaggcaatcatgctaattatatatgacttaatttagaggctttatacttaagagcattacatttctggcgtctcttaaccattattatttcataatgtgtaggttatggaacagttaaattattgggatcttaatatagaaattagtagaaataagccagatatggtggctcatgcctgtaatcttagcactttgggaggctgaggctattcgctgtactattttttactacttttctataggtttgaaattttttcaaaataaaacattgaaaaaagtaaggtaggtagtgtgtccctccttaatcctttcaaatattttattttcactatttctattaatttttttttttgtttttgagatggagtctcgctctgttgcccaggctggagtgcagtggcgcgatcttggctcactgcagcctccacctcctgggttccagccattctcctgcctcagcctcctgggtagctggtattacaggcatgcaccaccacacccaattactttttgtatttttagtagagacggggtttcaccatgttggccaggctagtctcgaactcctgacctcgtgatctgcccgcctcagcagtgtcactgcttctagaccgttttcaaggcacagagcttagaaatgcatgttactaagaaatcaagagttaactatttttcaccttctttctcccgcagtgagaaccctggttctaccctgtttctccttgtgtaaattttaatgctaaactatacacttgtgaaataaaaatgataatgtcattcttaaattatggatcttgcagtgttatctaagtaacatagattgagtgatttaactttaggtttccttatttgtggaatttggataaatatttttcacccttgagaaaagtgagactcctttctcatcatcagagtatccttaaaccattaaggcaaacatttgggaaaaaactgagctatctggctgcataaaaattaagttttctttaacaaagatagaagacaaatgaaaacctagaaaaaccatttggttcaagtaacaggaagctatcttatatatgaattagagaaaagcaaacacacaaatagaaaaaaagggatggggggtactaaagatataaatagcttgtctaccaaaaaagaaataaaataaataacatgaacatataaaaagacacttacttcatgaatgtgatgcaagttcaaacaataaataacatttctgtactttcatattggctaaggttaaaatgataactgctaggaagggtatggagaagtgtgcgccttgcactgtagtgggagtatagaccctcagactttatggaggtcagtctggaaatatgtttcaaaatgtaaactacatgtcctttgaccaggtaattcaacttcttgaaatttatccaaggatttaattggataaatgtttaagatgtatatataagaatgtttactgcagtgttgtttatgattttaaaaaaatggaaatcatcttcatgtctaccaatagagaatgggtgaataaattatggtatgtccatatatacaaattacatagttgttggaaatattaggtagatttagatatactgatgttcaaaaatgtccattatgtaagtgaagctgggtcacagcaccttgtgttgagtatgatttcatctagaaacaaaattactccctcatcctttgttgtgttttagttttttaaaataagcttataccattgggctgggggaaaagtaaatactcgttttggagagagaaaagggcactaaagtttcagataccgttagattatttcatgcttatttttcaagcctcaataaattacataattcacatgtagtcttggattaaggaaattgctattaaggctaaataaataatatgagaggtatataatataaaatatgaacattatattggcattaagattggatccacggtcattccagcctctcattcttacctggacttcaagtgatcacttgtgggcaaatgccatctgacttgaacaggttacacatgtatgctcattatatcgttattttcaaaatttgtcatataaattttccttgagttcattcagatttttgaactagttttttctcttgggagtagtacacacttaattctctctagtactaagctaatgttcaccattcttataattttaagtatccagcatttagtaaagaagtctttgttttctttatccttacttttagtgaatgtcttagtttttaattgaaaattctgccatgaaaataagctctttaacatcttcactccctaatcaaaacagaaatccttcatagccttcagttgtagctatccttccctgtgatttgtccagctccattatatttattttgaaatatggtgaccagttttgcaaaattatttcaactgtaggtgcccagtgattttgtaaggagaagatactgtttctgaacagttctcagtagccagtggcctgcccctactttttggcctgcgtgtagtatataaaataatgcagttaactttttatagcacttttcattttataaagagattttcatggtctttaatattaatctatgtataaagtcctgtatgcagttttacctactttcacagctgaaggaacaatagcttagagaagatgtgagataaagtagtttgcccaagcccatagcacaaataagtgaagttcttcggctgtccatggatcgaagactcccaagtctatctctagcctggacttctgtcctgagcaccagacatgtatgtatatcaagatgcctgcaggtcatatccaccaggacaacccatgagtacagggaattcaacatgcccaatatcactcatcttttccttcgccctcccctttgtactcatcccctgtcggtaagctctgttattttaaaaaattgaaatgtattcacatagcatacaatttacacttttcaagtgtacatggtttttagtatattcacaagggttgtgcagtcattactactaattccagaatgttattatcaccccaaaagtcccacatccattagcagccactccccaatcccttctcccaccagcctctaaaaactgctaatttttccatctctgtggatttgtccactctgattatttcatataaagagaatcgtacagacgtggccttttgtgtctggcatcctccacacaggatgatattttcagagttcgtctatgtttttgcttgttgatcattccttcattcctttttctggctgaataatactctgttatatggatataccttattttgtttatctgttcatttgatgggcatttgagtgatttcctctttttggcaattttgaataatgccactataaacatttatgtacacgtttttgtgtgaccatatgttttcacttctctcgggtgtatatctaaggtacagttgctgggttatatggtagctctgtctttgactttttgaggaactgccaagtggttttggtagtgattgtactgtttacattcctaccaacaattttacctaagtatttctcaaatctatttaatcttttcggtccatactgctgttgctgccttagttcagattttgtcatttcttgtaataattcgtagctcatctcccagtctctgctcccctctctccctccctcccccttcttctctctcttatttccacccatttttaacatttatagaagtcaaaagtctagttcagaaagcagaaaccatactagatatttcagcacagagaactaattaggtgttggaagactgaaaggcaaaaaaacactgaagtaacacagtaacatcaagaatgggcactactcctaagattcagggaatgctgggaagatttggggtttatcagaactggaagctcagaggaggggccccttgtcgctgaggcttaatccctgcagaggtgcctttggctgctactggtgaatctgagtgggtatgatgagtcagtgtctgggaagggccaaaacattttgtccctttctataatttgtcatgataatgctagtaatgaatctgatctcccttcctattttaaaaaccttttagtgattttgtataggatgaagtttaaaactccttacttaatatacacatgaccctccgtaagctggcccctgcttgattgtccagtttcacttcttggtgcttattctaaggcctctaagccttagagatcctctaagcctttgagatccccaaaccctggactgcggactggtacccacctgtgtggcctgtgaggaactgggctgcacagccggaaggaggtgagcattacttgccttagctcctgtcagatcggcagcattagattctaataggagcgtgaaccgtgttgtgaactgcccatgcaaggatctaggttgcatactccttaggagaatctaactaatgcttgatggtctgaggtgaaacagtttcatcctgaaatcacccccaactcggtccttggaaaaattgtcttccacgaaactggtccctgatgccggaaaagttggggaccgctgttctaagctaaagttatatggagctccttggttctgtgtcctcaacatgctgttctatgttttttacattctgtttgctccttcctgcttggaatgtccttcccctccccgtctttcttaatgcatacaaagttgatctctcctgtgtgccaccattgtacttcgtcttgcatatggtgttacattcattttattttaattatttatttacgttcatgtctcttccactcaccttagttgcttgaggtcagaaactatataatgtgtgacacggaatgtgacacctagattttcaataagtgtttctatgatacaagggagactgatgtgggtagatgggaatgaactcatcaacctctgtttacataccctaaattccctgtttcttccctattataattctgacagtctacaaccgtctttgatggcttataaacggaaagtgcggaacacatcattctacagtgaatttaaataacctttcggaagagtaacgtaaagtacttgagcattaattgagtaaaagtttctcatcttttcctacaggtgttattaagcagtatgtaaaaagtccttacaatacttaatacattaagaaaacatacaatttcaagaggaaatccccgagtaatacattattgacattttcagcagttctagttatattgagaagagcatctcatggaattggcagaatgaagatggagattaaatgagatgatgtttgtaatatgcttatgacagtatctggcatataagtaagggctcagtaaatgttgactgctgtaattactattaatagtaatatgattacctttagtaaaagttattagtttctttaggttttttgtttactacaatatagtaaacaaaatctatacttggaatgtatatattgttttgttttgatacatggaatatgtctctgtgtcagagtcactgcctgagttggaaaacccatactcgagtatgttaaaaggtgaacacactgaataatttagttattaattataatggaaaaatgacaaacttgatgttctggttaatgaggttatcttatcttgaatgagttagcttttaaattcctcaaaataaaggcatttaataaaccaggaaacacttcattaaaaaaattatgcaagtcagtgtaaaagaagattaaaattccacatgggcaaaggacacacgttggcgataaatatgcagataagaaaaaaaacctatataacattattactcctcaaagaaattggtatgaaaacaataaaaatgtgtagcttatcaaaccaacaaaaatttaaaaatatgaaatccattttaagtaatgataaaatgggtgcactcttagtgctttatagaatagtagtataatgaacctcatgtgtgtaccaaccagctctttcatatcttaacatttagcaacatttgatttagctctttcttttttccaagatagaaaagttaatattgttgaagactcctgcattcttttccctagtcttattttcttccctcccataaatgtgttaaaatctctgtgtgtattgttttggttgtatttttacataaaactttacatattatataaaatttaattgaaggtaaaatttattaaattattcttaatatatattgtaatttaaaaattaacagcttcattgtcttgataaaatttatggtatcttaaacatgtgcttgtttttctaagagaacattgaaacatagattttaaaacaaattgttgaaagattaaaaaatctgcctttgcacactgttacattgaaagtggggcatttgtcgtgaacattcatttcaaatatgtagtatcttcagaatatttgagaaggatttgtattatataattgaaaaatctgttaaattgtatttatgttaactgcttaattctaataaaatttccattcattttttagtatctgcatatatttacatcaaatggattcattcacttatttaagaggcagtactaattacctatagcgttcaagactgttaggtagagggtgtgtagtggtgagtacaacaggcgtgagccctaccaacacggagtttaaagcctagtagaggatatagacttaaacaatttcacaagtaaatacataattacaaattataatacatgctatgaaggaaacataggaggtaccagagaaggaagagtgctttgcatttttatttttaagaccgaagagtgctattggaggactttgagcaagtgaatgacatgatctaacctaccttcgttcattcattcattcattcattttcttccttcctggctcaagcagtcctcccacctgagctccccaaatagctgggactacaggtacacactaccacacctaatttttttttgtattttttgtatttttgatgggattttaccatgttggccaggctggtcttgaactcttgacctcaggtgatccacctgtctcggcctcccaaggtgttgggattataggtgcctagcccatggtgcctagccctaacctacatttataaactatcacttgctgctgtgtggagactatattgtgagattaacagcagggatacctgctaggaagcaattgctgcagattgcctgagacaaaatagttatcatggactagggggatggtggtggtggtggtggtaggtggttggatgtaggatatattttgaagataggtaaatggtgcaagattatgggtcagttttaaatgcttaagtaaattttctttgtaagacattttaggatgccatgttaagaatctctttataactgtcatttaaaaaaaaaccacatattttcttagcataatttcccatagtaacattactatgtcaaaggctatgaacatttgaatgactttagataaatactgtaattgctttccaaaaatattgtgcttattatgtcaccagaaatgtttgaattctgtctacaattcagtcttgccagtatagtacatttcatttagaaaaattttttactatgtagatggaaaaaataatattttagctgggagtggggggactatggggaataactttccttcatttaatattttattgtgagttagtttaagttactttattttatcgtagtttcctaaggctacaaattagtaaccttggtaacttatgtacctaatttaaaagtttacttttttgaaaggctggaaatactaattaaaaacgtaacaccttcatccttgtctttgctccattattaactagtttcattacagaatctctgtgttttaaaatcagatgggttttcataaccagtactttctcagagtggtaaatttaaaaaaatatataaagagaataaataatatttgttgagaatacttcaaataatgtgaagagttattaacttacagcaggagttggcaaacttttctataaagggccatatgggtctttgtcacaaagtcttgggtttttgtttttgtttttttaaacagctatttaactattcctagctaatgggcaatacaaaaacagtgggcaagatttggcctgtgggcagtagcttgctgaaaccttatttagactctaaattttttgaaagagtctacattgatgcatatttttttttcttcctccaaatacagttgacccttgaacaacatgcgtttgagtgaccatgggtccacttgtgatacacgtttttttcccaaccaaatgcagatatggagggctgacttttcatatacctggatgttcctgggccaactgtaggactagaggctgggggggtcttggaaccaatgccgtgtgtataccagggatgactgtttcttatggcctgacctgaagttggaacagaatctttattaatatataatttttgttgcgtttgttttctctttatatttatccattctttttagatcgtatttcatttaacactttttcttctttagtttttaccaagttgcactgaaaatagctcagtgactaattgcacttctaagagtgaggaccctagttaaaattaactctaaaaatactgaatttttaacctaaaccttttatttctaatcaacagtattatttatgagtaggttatagattactttgaaacggaatgtgtctcagaactttgctatcgatatttttaaggtctggtagggaaaagataataggaatgagatttatcagtgaataggggactgctttcccagtttctcggtcgcactggtgtattcaccatggaagcatcttatgaaatatgtacataaactactaatatcccacattacaggttgactattctttatctgaaatgcttaggacctagaagtatttttggattttggtttttcagagtagggatactcagcctacattggtaagtaaagaatgtgaggtgacaggctgggcgcgatggttgacgcctgtaatcccagcactttgggaggccgaggcggatcacctgaggtcaggagttgaagaccagcctggccaatctgtactaaaaatacaaaaattagctggacacagtggcacgtgccagtagtcccagctactcaggaggctgaggtaggagaatcgcttgaacctgggaggcggaggttgcagtgactcgagatcgtgtcactgccctccagcctaggcaacagagcaagactccatctcaaaaaaaaaaaaaaaaaaaaaaaaaaagaatgtgaggtggcagcaataggtaggaagagtctttggtcagctttacatgctctgtagccatgcctgggtaatgggttgactctaagactctgtgctttgctcccacctcctgctttttcattactctttagaatggtttttaatttgtgatctataggagttctttcaagtatttaataagagaataggctaaattaagtaaatgtcaactgaatgctcaaatctctactaaagagcctcttatttagaaaataaatatccatcttttttttctgactggtgagataattaatttttattacagatggtttggaaaataccatatgctttaaaagataagcacaaaattatagtctaatatgtaggttttcatactttaaaaaattgaaaaccaaagaaaaacatttaacatagcatctagtacaaagaaaagagataagcaagagataaatgtcttttttgggacagagttttgctgttgttgcccaggctggagtgcaatggcacaatctcagctcaccgtaacctccacctcccgggttcaagtgattctcctgcctcagcctcccgagtagctgggattacagtcatgcaccaccaggcccaggtaattttgtatgtttagtagagatggggtttctccgtgttggtcaggctgatctcaaactcccgacctcaggtgatctgcccaccttggcctcccaaagtgctgggattacagacatgagccatcgcacccggccaagataaatgtcttttaaattatctccattaaagacataacctttataacattttgatgtatatattaccagtttttaaacacatagtagatttgtataaatacataaacacatattattgtgatcatgctgcacttagacatctttatattctccttatactgtaaacattttgaaatactttactaacaacatttgtaatgaccattctttctctctttctccctctgatagaatggtctacagagtaattcataaactaaacatactttagaggctgggcgcagtggctcatgcctgtaatcccagcactttgagaggctgaggcgtgcagatcacgaggtcaggagttagagaccagcctgactaacatggtgaaaccccatctctactaaaaaaacagtacaaaaattagccgggcgtggtggcgtgcacctagaatcccagctactcaagaggctgaggcaggagaatcactcgagcccaggaggcagaggttgtagtgagccgagattgcaccacagcactccagcctgggcgacagagcgagactccatctcaaaaaaaaaaaaaaaagatacattaatactatagcctacatgtggaacattaagaaaataattgcttttatgtttatgctttatacctgttgttagccctgcttcttatttcatgatttcatggcttcacattgtaacatccctttaccatattttttgaggactgttttggcagaatgtgtgaaatcttgagcagaagtattacccaaaagtcagaagaaaatcagatttttatttcaagattctgttaaagttacccactcccttcttttacttaatcttatagttgcagttctctctctttttagaaaagaaaaaagaggcccctcaggatttgcagatgaaacaatattgctctttagagatatccatctggctgttagattatttttccacagttttcagaagtggatgaggccattagaatcttgagtattgcccatttccttatgtgtgcctttgactatagataaaatagatgcatgacaattatttataagttgattgatttttcttgtcatttaaatcatcttgaataatagagttggtagagctatcccatttttgaaattattttgttttgtcaataactttttgttaccagcatgtacacttgcattgttgactctccatataatacctttaaaaaatttttttttgtggtaaaatatgcataacataaagtttaccatggtagttttctttcatttgttttgtttttgtttttttgagacggagccttgctctgttgccaggctggagtgcagtggagcgatcttggctcactgcaacctccgcctcccgggttcaagcaattcccctgcctcagcctcctgagtagctgggactacaggcgcccgccaccacgcccggctaatattttgtattttaatagagatggggtttcaccatgttggccaggatgttcttgatctcctgacctcatgatccgcccacctcggcctcccaaagtgttgggattgcaagtgtgagccaccgcgcctagaccatggtagttaattttaagtgttcaattcagtgaccttaagtgtgttcataatgttgtgcaaccatcaccatgttgtctaaccattagcactatctgttttgagaacttttttttatcatcccaaattagaattctgtacctgtcaaatagtccccagtaatcctccctcccccagcccctggtaatctgtagtctacttttcgtctttttgaatttgcctattttaggttcctcatataagtggaattatgtggtatttgtccttttgtgttggcttacttcatttagcataatgttttcaaggttcatctgtgttgtagcatgtatatacaggttgaagcatccgttatccaaaatggttgtgaccagaagtggtttggatttcagattttttttttggattttggaatattcatagatacttaactggttcagcatccctcgtccaaaaatccaaaatcagatggagctcagtggctcatgcttgtaatcccaacacgttgggtggccaaggcaggaggatcgcttgagcccaggagttcaaccagcctgagcaacacaagaccctatctctccaaaaaaaaaaaaaaaaaaaaaaagatgaaagaaaaaaaaatccaaaatcaaatgctccagtgagcatttccttttagcatcatgtcaggctctaaaagttacaggttttggagcattttggatttcagatttttggattaacctgcattaatgctcaacctatatgaaattttattcctttttatggctgaataatgttccactgtatgtatatactacattttgtttatccattcatctgttaacagacacttaagttatttccacattttgggtattataaatagtgctgctgcgaacattggtgtacatgtatctgtttgagtccctgtttttagttattttggttatatacctaggaatggaattgctgatcatatggtaattctgtgtttaactttttgaggaactaccactgttttccacaatggcatcaccattttacattcccaccagcaatgcacaaagatttcagtgtctgtatccttgctaacacttattttccattttttgagtttttttgttttgtttttttaataatagccaatcctaatgggtatgtggtagcatctcatggttttgattttattttcctgactattgatgatgttgagcatcttttcaggtgcttagtggccatttgtccgtcatctttggagcaggaacaatgtcttttcaagtcctttgcccatttttaaattgaattttttgttgttgagttgtatataacaccttttttgaagtaaaaggtgcactgtaataatccagactgtgtttctcccttctcaggattcctacaggaagcaagtagtaattgatggagaaacctgtctcttggatattctcgacacagcaggtcaagaggagtacagtgcaatgagggaccagtacatgaggactggggagggctttctttgtgtatttgccataaataatactaaatcatttgaagatattcaccattataggtgggtttaaattgaatataataagctgacattaaggagtaattatagtttttattttttgagtctttgctaatgccatgcatataatatttaataaaaatttttaaataatgtttatgaggtaggtaatatccctgttttataaatgaagttcttgggggattagagcagtggagtaacttgctccagactgcatcggtagtggtggtgctgggattgaaacctaggcctgtttgactccacagccttctgtactcttgactattctacaaaagcaagactttaaactttttagatacatcattaaaaaagaaaaccataaaaaagaatatgaaaagatgatttgagatggtgtcactttaacagtcttaaaagcaatcgtgtgtatagcatagaattgcttggattggataaacagtggcattatatattttaaaaaataaaagttttgaaagattgaagaatttgggcattacagttctcttaaatctgacaaagctgcataaaactattaaaataatcattattatactattttatattctatttctttgagggtttagttttccaaaaactacatattaagcaaatgaatcactcagtggctatgtcatataataacgagttagcctagttataagaagtttaacattttatttaagaacattgttacagcatgtttactgtatagtctagtaatagaggaaaagacatttgggtgggtggtagtggtagtatttttatagaggagttaccaaatttcagctctattatccaagtttacccagctaatggtgttcggaaccgggaatttgagccaattctgactctgttgtctgctctgctccttcttttgtgctgtgtctttgaaagtcacctaaaattgtgagggaatgtaatttcaccccaaatttagagtttatgcacttgttatattgaaaatgattaacatgtagaagggcttttaatggaataagtggtgtagtaacttcagtgttgcctacctagaaatcaaaatctttctagttgtccactttgttttttgaaaaagtaatatgaaaattatgttaatgctttaattcaggtttttgtaaaatattttttatctttacacatttaacatacgtttctaaaattatagtctgttatatagcactttgggtctagaatttttcagtagtttctgttttactattatgatctacctgcatattaacctattaggttatagttttactatacttctaggtatttgatcttttgagagagatacaaggtttctgtttaaaaaggtaaagaaacaaaataactagtagaagaaggaaggaaaatttggtgtagtggaaactaggaattacattgttttctttcagccaaattttatgacaaaagttgtggacaggttttgaaagatatttgtgttactaatgactgtgctataacttttttttctttcccagagaacaaattaaaagagttaaggactctgaagatgtacctatggtcctagtaggaaataaatgtgatttgccttctagaacagtagacacaaaacaggctcaggacttagcaagaagttatggaattccttttattgaaacatcagcaaagacaagacaggtaagtaacactgaaataaatacagatctgttttctgcaaaatcataactgttatgtcatttaatatatcagtttttctctcaattatgctatactaggaaataaaacaatatttagtaaatgtttttgtctcttgagagggcattgcttcttaatccagtgtccatggtactgcttttggctttggtttctttctacattgaaaatttctcttcaattctgagcacatgttaacatttagaattcaagaggtggggatttttttttcccatggttacatatatatatatatatatatatatatatatatatatatatatatatataaagaacagggcaacaaatttttgcgttttctatttcggtagtacttttaaaccattatgtcatgtttctaggttaaacgttgttgtatttgaagaattttactttggcagaatttttttgaggatgtgtttatttctggagaaaggtctcattaaagaaagacaatacccagaaagccaacagaaattctgttactcatttaatgcatttttctgacaaaaattattgccagagagaacctgaattttgtttcaaaaatcatctttgttttaaaaatgactttttcttcaggtaaaataaaataatttcagttgctattatttaacctgtttgtatgaagagtttaacatataggaaatgaatacataaagataggaaggaattaattgttatatgtagtcatatgtctcttaatgacagggatactttctaagaaatacattgttaggtgattttgtcattgtgcaaacatcatagaatatacttacacaaaccttggtagtataacctactatacacctgggatatgtagtatagtctcttgccccagggatacaaacctgtacagtatgtaactgtactaatgactataaggcaattgttaacacaatggtaagttttgtgtgtctaaacctacacttgggctaccctaagtttatatatttttttaaatttctgttcaataataaattaaccttactttactgtaactttttaaactttttaatttttcctaacattttgacttttgtaatacagcttaaaacacacattatacagctatacaaatttttctttccttatatctttattctgtaagcttttttccatatttaaaattttttgtttgtttttacttattaaacttttttgttaaaaactaagacatgcatgcacattaacctaggcctacacagggtcaggaccatcaatatcattgtcttccacttccacatcttgtcccactggaagatcttcaggggcagtaacacacgtggagctgtcatctcctataataacattgccttcttttggaatacctcctgaaggacctatccaaggctgtttatagttaacttttttttttttttttttttttttttagtaaataggaggagtacactataaaataacaatataggtgctataccattatacaactgacagtgcagtaggtttgtttacaccagcatcaccacaaacacgtgagcaatgtgtcgtactacagtgttaggatggctataacatcactaagcaataggaacttttaaactccattataatcttatgggaccactatcacatatgcaatctcctgtggaccaaaatgtcattatgtggtacatgactgtactaagaaattgatccatctatattccatcaatttgtttagggctttttctggttacatttacctgtgagcccagaaaaccagttttgtagaaattaacttctgtaatgctaggagttaaaaaaaattgctgaacaacttttacattgttaaacatttaaaaacaagcgttctagaagtttatcaaatttcataaaggtgcaaaaatgtaaatgtaaatcattatccagctaatatatatgttgtatttccctagtaggagagcatatgtacctcttcctagttatacaaatttgatatatagtaaagaaacagtaaattctacttcaagtcattttgggaggattaaaaactgaatttctctagtttgaccattgtacagatttatctggcaattttactaaaacctgatttataggttaaacttggtgtatatcatatatcactttactttagaggaattaagatttcacataaatccatttccaggttccaaagaccaggaagaggcttggtttttgtttttctttttactgtctttacagtctccttgacttttcttaggagagaaggtactgagaaaacatgattctaatatttattattttttcttccaacattttcttatgaaacattttcaaatacaaaattgagttttatttaaaacatttgcaaatatactacctagattctaccattgttgttttatatttgctttacttacaacttttaaaagatgctttttataccactgaacattttagcttacatttcacaaagaaaagaaaaaatttaagagactttgcataatgttttaaggggttgcagtaaagaagtgcttcttatattttcttatgcatacaaatcagctgggcttattaaaatccagattctaattcagaaggtttaggtggggaccgagtctgcatttctaacaaactcctaggtggtatttttcttggtacttggaccatactttgagtagaaaagcagtagaggacataaaaagagtcttgttagtcccactttgttgctgtccacttctcatttgataatatcctaaaatagctgtgtctcctttttggtggttgtatgattactacctcagaagtactaattgattcttgctatttgaccttaatactttaatataacacagcattcatatttgatcagaaaactatctggcttccttttataagagatttttaggttttatacagttttgtggccttgggtttttttgtttgatttgtttttttgaaggtatataatatgtaagtagataaacaaatttgatttgtagacatttttatgtggatcatctaattaaaaatggagggatacagtatgaaagaatacttgtacttcttaacagagcactcaacctttcttttacatcctgtttcactgatgttattatgtaatttatgttgctaaactataaattagatatttaatttctgttctttgatttccttttattattaaatggacttgttgatttgcctagaaattaatttgcctttcaaaagtcttattaatcttcctccgttgaaattaatttgatatttgcatgcttctggaagactttaaagagctattccgagtaactgtagagattataaaatgaaatatgggaattttaataaattttacatctccagttactggtgaaaatgtcaagtcctcctttctgcagagtattttgttactcatctgttattcagcttatttatttatttatttatttatttatttttctttctttcttgttttttttttttgagacggagtcttgctttgtcgcccaggctggagtacagtggtgggatcttggctcactgcaggctccgcctcccgggttcacaccattcttctgcctcagcctcccaagtagctgggactacaggcacccgccaccatgccttgctaaatttttgtatttttagtagagacgggtttcactgtgttagccaggatggtctcgatctcttgacctcgtgatccacctgcctcggcctcccaaagtgctgggattacaggcatgagccaccgcgcctggcccttatttgttttttaaacaaaattagtgtgcatatccttgttgtattttatcggcaagttgttttatgccctaacttttggggtcttgatcatgagcctaaaacacgtaaacacccaaaaagaattatattccggttaaaggaacaaaacattcatttagaagttctcatccatgtaaatcagaggctggcaaatattttctgtaaagggccaagatagtaaatgttttaggctttgagggccacaagtggtatctgttgcatttttttttaattatgaccctttaaaatgcaaaaatcgttgttagcttgtgcatagtataaaaataggctggccgcatgctgtggctcatgcctgtaatcccagaaatgaggtgggaagccgaggtgggcacaccacctgaggtcaggagttcgaggccagcctggccaacgtggttgaaaccccgtctctactaaaaatacaaaacttagccaggcgtggtggcgggtgcctgttatcctggctactcaaggggctgaggcagtagaattgcttgaacctgagaggcagaggctgtagtgagcccagatcaagccagtgcacaccagcctggacgaccgagcgagactctgtctcaaaaaaaaaaaaaaaaggctgtggctgcatttggtccattggctgtaatatgctgattcctaattctctgggtaactttagtgtttgattagctactagaagttaggttaaacttttgtattttacaggctaactttaataatcttaaagtaaaacttaacatagttcatggaaaggaaatagaaattttaccctagtactcttttttttttttttttttttttttgaggcagagtctccctctgtcacccaggctggagtgcagtggtgggatcttggctgattgcaacctcctcctcctgggttcaagcaattcttgtgcctcagcctcccgagcagctgggactacaggcacgcaccaccacacctgactgatttttgtatttttagtagagacagggtttcgccatgttggccaggctggtcttgaactcctggcatcaagtgatcctcccatctgagcctcccagtgtgctgggattacagacgtgagtcactgtgcctggtctctagtattttttttttttttgagacggtctcactgttgccaggctggagtgcagtggcgcgatcctggctcactgcaacctccgcttcccggattcaagcgattttcctgcctcagcctcctgagtagctgggactatgggtgcacaccaccacgcccagctaatttttgtatttttagtagagacggggtttcaccatgttggccaatatggtctcaatctcttgacctcgtgatctgcccgtctcggcctcccaaagtgctgggattacaggcgtgagccactgtgcccagctgtactttttaagataagaattgcagggtatatatttttaccaacttaataacttataattttaaaaagctaattacttggctagaatataatgcgttacatattctttacactcagttcagtccatatctgaaaggcaaatagaattattttctgctagtacattgtgtagtccctatgttcctagtgtataaggactgttacctagttcacatttatctgggttgttgacagattttcctggtccctttggacagtgcatggccatgttggcaaaagctgtcaaaattgaaacattgacaccatgagaattgtgtgttttccagtctgctaaaatcaaaagtgggagggttcagtaaggtgaataacagaagcagagttttcggggtatctgttactcctcattcggcttttctgctctctgggggtctcaatttaaatataatgtgaaaattagttttacgaacctaaaaatgttgagtgattcatttcctggttttgttgttaatttctagatatttaaattaattgttagaagaaccccgttaaagaatgctttgcaaaacaacctccttatgtgctatgtctctgtttaatagtagttgagtttgtgtacatgagatcaatattttgaactatagctttttatgagttaaaaattgacggaacagttactgtgcacttgctgtgcaccatggtagtctcccaagtagtggtttttctgcatttcaatagtacatgagataggctgtgggtggcaaggtttcttgagaaagtgagggatgcacagttgggttttagaatacatcttgttcctccatgcccttccccaccaaaaggctggtagtcttgcatttgtatatagttagggtatttgatgtgttgcttccttgacagagttttgcaagaatttgcagatttaacaggaacaaaaacttacttaaaacaaaatctcttagtaaaagcatagtctagcaagatttagaatgatactttggctaacagtactttctctatatggagtgctttgtttccatagcctcacaagtatgttttcagataatagttgagttgaaaatgttgtcaatctcttgattttaaaaaatttacatatttaaagttgtatacttttgttcctacgtattttcagttgttcttaaagtttaataagtgacatttgaaaatgagtatatgtgtataaaaacaaaagtaggctaggcacggtggctcatgcctataatcctagcactttgggaggctgaggcaggcggatcacaaggtcaggagtttgagaccagcctgggcaatatggtgaaacccccctctactaaaaatacaaaaattagctgggtgtggtggtgcatgcctgtagtcccagctactcaggaggctgaggcaggagaatcgcttgaacccggaggtggcggttgcagtgagccgagattgcaccactgcagtccagcctgggcggcagagcgagactccatctcaaaaaaaaaaaacaaaaaaagaaaaagttaaaaaaaaacaaaaaacccccacaaaatgagtatatgtggcaacaagtcctattctcaaaaaaattattgtgtgctagttaagagcttaatgagtagccagtcggtattaaatatctgtttcagctatattttatctttaaaaattatctacagattttggaatgtgaaaaactagtgttttgtttcataggtatatactgtaggcattttaaaaataagagccagtgccagtggtttacagtgtacacaaggataatgttctcatgttctcttgatgtcagtatgactttaaagcatattatcaagaaataactaagtctgaaaaactgtggtaaataactggtactctaaaacctaagtttcttattactaaaaataagaaatggtaaaagtcaccctgtgctgttaattatatgagccactgaggtcctgacactgaattcttggtggtggataataatctcttctttttaattattggcttccaattctctctgcattgctggaaacaaaaatcatatatttcactattggtggtggggatgctgtcactgaaaaagtagacacattcatattgattttagaaataagttaaaatcaaaatttgcttctgctaaattagtagaggaccaatactgtttttctccttcatagtatgttttggtacttctacattgacattataacttttttttttttaaacagaaatagaagtttacattcttagaa

SEQ ID NO: 36 - protein, 188 aa, Artificial Sequence [sequence omitted]

SEQ ID NO: 37 - DNA, 5306 bp, Artificial Sequence
  KRAS (WT) mRNA
ctaggcggcggccgcggcggcggaggcagcagcggcggcggcagtggcggcggcgaaggtggcggcggctcggccagtactcccggcccccgccatttcggactgggagcgagcgcggcgcaggcactgaaggcggcggcggggccagaggctcagcggctcccaggtgcgggagagaggcctgctgaaaatgactgaatataaacttgtggtagttggagctggtggcgtaggcaagagtgccttgacgatacagctaattcagaatcattttgtggacgaatatgatccaacaatagaggattcctacaggaagcaagtagtaattgatggagaaacctgtctcttggatattctcgacacagcaggtcaagaggagtacagtgcaatgagggaccagtacatgaggactggggagggctttctttgtgtatttgccataaataatactaaatcatttgaagatattcaccattatagagaacaaattaaaagagttaaggactctgaagatgtacctatggtcctagtaggaaataaatgtgatttgccttctagaacagtagacacaaaacaggctcaggacttagcaagaagttatggaattccttttattgaaacatcagcaaagacaagacagggtgttgatgatgccttctatacattagttcgagaaattcgaaaacataaagaaaagatgagcaaagatggtaaaaagaagaaaaagaagtcaaagacaaagtgtgtaattatgtaaatacaatttgtacttttttcttaaggcatactagtacaagtggtaatttttgtacattacactaaattattagcatttgttttagcattacctaatttttttcctgctccatgcagactgttagcttttaccttaaatgcttattttaaaatgacagtggaagtttttttttcctctaagtgccagtattcccagagttttggtttttgaactagcaatgcctgtgaaaaagaaactgaatacctaagatttctgtcttggggcttttggtgcatgcagttgattacttcttatttttcttaccaattgtgaatgttggtgtgaaacaaattaatgaagcttttgaatcatccctattctgtgttttatctagtcacataaatggattaattactaatttcagttgagaccttctaattggtttttactgaaacattgagggaacacaaatttatgggcttcctgatgatgattcttctaggcatcatgtcctatagtttgtcatccctgatgaatgtaaagttacactgttcacaaaggttttgtctcctttccactgctattagtcatggtcactctccccaaaatattatattttttctataaaaagaaaaaaatggaaaaaaattacaaggcaatggaaactattataaggccatttccttttcacattagataaattactataaagactcctaatagcttttcctgttaaggcagacccagtatgaaatggggattattatagcaaccattttggggctatatttacatgctactaaatttttataataattgaaaagattttaacaagtataaaaaattctcataggaattaaatgtagtctccctgtgtcagactgctctttcatagtataactttaaatcttttcttcaacttgagtctttgaagatagttttaattctgcttgtgacattaaaagattatttgggccagttatagcttattaggtgttgaagagaccaaggttgcaaggccaggccctgtgtgaacctttgagctttcatagagagtttcacagcatggactgtgtccccacggtcatccagtgttgtcatgcattggttagtcaaaatggggagggactagggcagtttggatagctcaacaagatacaatctcactctgtggtggtcctgctgacaaatcaagagcattgcttttgtttcttaagaaaacaaactcttttttaaaaattacttttaaatattaactcaaaagttgagattttggggtggtggtgtgccaagacattaattttttttttaaacaatgaagtgaaaaagttttacaatctctaggtttggctagttctcttaacactggttaaattaacattgcataaacacttttcaagtctgatccatatttaataatgctttaaaataaaaataaaaacaatccttttgataaatttaaaatgttacttattttaaaataaatgaagtgagatggcatggtgaggtgaaagtatcactggactaggaagaaggtgacttaggttctagataggtgtcttttaggactctgattttgaggacatcacttactatccatttcttcatgttaaaagaagtcatctcaaactcttagttttttttttttacaactatgtaatttatattccatttacataaggatacacttatttgtcaagctcagcacaatctgtaaatttttaacctatgttacaccatcttcagtgccagtcttgggcaaaattgtgcaagaggtgaagtttatatttgaatatccattctcgttttaggactcttcttccatattagtgtcatcttgcctccctaccttccacatgccccatgacttgatgcagttttaatacttgtaattcccctaaccataagatttactgctgctgtggatatctccatgaagttttcccactgagtcacatcagaaatgccctacatcttatttcctcagggctcaagagaatctgacagataccataaagggatttgacctaatcactaattttcaggtggtggctgatgctttgaacatctctttgctgcccaatccattagcgacagtaggatttttcaaacctggtatgaatagacagaaccctatccagtggaaggagaatttaataaagatagtgctgaaagaattccttaggtaatctataactaggactactcctggtaacagtaatacattccattgttttagtaaccagaaatcttcatgcaatgaaaaatactttaattcatgaagcttactttttttttttggtgtcagagtctcgctcttgtcacccaggctggaatgcagtggcgccatctcagctcactgcaacctccatctcccaggttcaagcgattctcgtgcctcggcctcctgagtagctgggattacaggcgtgtgccactacactcaactaatttttgtatttttaggagagacggggtttcaccctgttggccaggctggtctcgaactcctgacctcaagtgattcacccaccttggcctcataaacctgttttgcagaactcatttattcagcaaatatttattgagtgcctaccagatgccagtcaccacacaaggcactgggtatatggtatccccaaacaagagacataatcccggtccttaggtagtgctagtgtggtctgtaatatcttactaaggcctttggtatacgacccagagataacacgatgcgtattttagttttgcaaagaaggggtttggtctctgtgccagctctataattgttttgctacgattccactgaaactcttcgatcaagctactttatgtaaatcacttcattgttttaaaggaataaacttgattatattgtttttttatttggcataactgtgattcttttaggacaattactgtacacattaaggtgtatgtcagatattcatattgacccaaatgtgtaatattccagttttctctgcataagtaattaaaatatacttaaaaattaatagttttatctgggtacaaataaacaggtgcctgaactagttcacagacaaggaaacttctatgtaaaaatcactatgatttctgaattgctatgtgaaactacagatctttggaacactgtttaggtagggtgttaagacttacacagtacctcgtttctacacagagaaagaaatggccatacttcaggaactgcagtgcttatgaggggatatttaggcctcttgaatttttgatgtagatgggcatttttttaaggtagtggttaattacctttatgtgaactttgaatggtttaacaaaagatttgtttttgtagagattttaaagggggagaattctagaaataaatgttacctaattattacagccttaaagacaaaaatccttgttgaagtttttttaaaaaaagctaaattacatagacttaggcattaacatgtttgtggaagaatatagcagacgtatattgtatcatttgagtgaatgttcccaagtaggcattctaggctctatttaactgagtcacactgcataggaatttagaacctaacttttataggttatcaaaactgttgtcaccattgcacaattttgtcctaatatatacatagaaactttgtggggcatgttaagttacagtttgcacaagttcatctcatttgtattccattgattttttttttcttctaaacattttttcttcaaacagtatataactttttttaggggatttttttttagacagcaaaaactatctgaagatttccatttgtcaaaaagtaatgatttcttgataattgtgtagtaatgttttttagaacccagcagttaccttaaagctgaatttatatttagtaacttctgtgttaatactggatagcatgaattctgcattgagaaactgaatagctgtcataaaatgaaactttctttctaaagaaagatactcacatgagttcttgaagaatagtcataactagattaagatctgtgttttagtttaatagtttgaagtgcctgtttgggataatgataggtaatttagatgaatttaggggaaaaaaaagttatctgcagatatgttgagggcccatctctccccccacacccccacagagctaactgggttacagtgttttatccgaaagtttccaattccactgtcttgtgttttcatgttgaaaatacttttgcatttttcctttgagtgccaatttcttactagtactatttcttaatgtaacatgtttacctggaatgtattttaactatttttgtatagtgtaaactgaaacatgcacattttgtacattgtgctttcttttgtgggacatatgcagtgtgatccagttgttttccatcatttggttgcgctgacctaggaatgttggtcatatcaaacattaaaaatgaccactcttttaattgaaattaacttttaaatgtttataggagtatgtgctgtgaagtgatctaaaatttgtaatatttttgtcatgaactgtactactcctaattattgtaatgtaataaaaatagttacagtgac

SEQ ID NO: 38 - protein, 189 aa, Artificial Sequence [sequence omitted]

SEQ ID NO: 39-40 - skipped (2 entries)

SEQ ID NO: 41 - DNA, 75171 bp, Artificial Sequence
  STAT3 Genomic Sequence
ggtttccggagctgcggcggcgcagactgggagggggagccgggggttccgacgtcgcagccgagggaacaagccccaaccggatcctggacaggcaccccggcttggcgctgtctctccccctcggctcggagaggcccttcggcctgagggagcctcgccgcccgtccccggcacacgcgcagccccggcctctcggcctctgccggagaaacaggtgaagggggtgcagggtggggccgttggggaggcctggggacccgggggctccgcagcggcagggggcctctgggaccttggggatgttgtgatggacgctgcagtggggccgggagagatgaagagacgcggagggtcgccctgagggaagactcttcgggatgacaggagcgggcctcggaagggactcggggcgctggagggaagtttcgttcttcggagaaacagaacgcgctcgagggggcaccgtggggcgagggcgcactcggttgcggcggcaggagtgagggacagtcccccgatttcctgctccctggggccctggggacgttccggccaccggagcgactgtcacgccgacggggatcaccggcgcgagtggggggtcggaaagcgcctcctccccgcccggtcggcggctcccgctgagccacttcctccgcttgccctgttcccgctccttcaggagacagctgtgcccttttggaggcaggaataggtgtgtctgtcgcctgcagccttacgggctggctggtcgtgggtaggctttattgcataagaatcaagtttcctgtagggaaattgacagaccggtactctttctaaattccctcgcatctttttctaggttaaattatgctccccccacgtccccgccttgtaaaaaagagaaaaaaagacaaaataaaatccccatcaacccgtcaagccagctctagagagagaaataaacctcttgacattgtccttttccaaatacctggtaaagtcggccagaagataaataattgagccattgcatttactggattgtggtgttgcttaattgcataggacggaatgaaccaattgagagtgggagttttctgtctcagagccaagatcttgggtaaatgcagaggagagggaaacaaagacaggctggccttgaaaaaaccatgtgtgcaaactttacatgcatttggggggtgtggttgcactgaagttaacaagattcaaaccgtcgcccaagttggtatttccatgtttggtacacatcactctgtgccatatcaggtcgttgttaagtgtggtgacaaaatcagtggttagtcatttttttaattaaaaatgtgtatagtgtgtacctgctggtcttactgtatgtgcaactaaaggtttacatagtctgtgtatgggttgtaaatttttggctggctgtgctgataaagcattgggcttgaataaagcaaagcagaaaatcatctcaatcttttatatgtggatttagactgtgttatgacttggttcagccagttttctatcttattttatattaaatatgtctgtgttctctgagtcagcacatttatttccttattacatgttccagacaggagtgctagcccagtttttgttcagtttgcacagtgggatggggaaacaagtctggaatttaaaaaaaaatgttttagaggttggagccttgattttagtctctatattagcacatccatcacaaagaaccattagtaaattcatgaatcttttgttttttatgtagttcatttgagaagaataatcacttagaaatatccacagtgccaggcatggtggtgcacacctctgatcccagctaattgaaggctgaggtgggaggattccttgagtccaggagttgagtctggtctgggcaacatggtgagaggccaggaattgggtctagagtctagtctaagcaccataatgagaacccatctttaagaaagaaagaaaggaaaggaggaagaaaggaaagaaaaagaaatacccacagcacagttatgaattaacccacaaaggacttgtgaggtgggtagttcacataacaattaccctaatatcgtagataagaaaattgaggccaaaggatcaagacacttggccaacgcagcagagtgccatagtggtggaatttgtgcctccttctgtatattttgtgaaaagtatcagtgaaattctttttttttttttttttgagtcagagtcttgctctgttgcccaggctagagtgcagtggcgcaatcttggctcactgcaacctctgcctcctgggttcaagcgattctcctgcctcagcctcccaagtagctgggactacaggcgtgcgccaccacgcccagctaatttttgtatttttagtagagaccggggttttaccatattggccaggctggtcttgaactcctgaccttgtgatttgcccacctctatctcccaaagtgctgggattacaggtgtgagccaccgcgcccagtaagtatcagtgaaattctaacatatatctgaacagtaaaataccaccaataggctgaaagacttcatgggaggtaaatattcaataaacaggtgaaaaaagaaatacaaatggagcttgcttagattatttttctaattgctatgtctaacttgggaagtgaggaactgtttttggtcagcataatttaccatcagaatttagctatttactaatgaaaagaaatactaatctaggtttgttttagattaaggacagtcatgacctaaatgtcatttaaaccagagtgcattgtggcttgatcagtggtcatttctgtctctagaaagttgctttaacttctctgcctctacgtgtctcttgacattcagatatgaggtggggtagaggtggtgaccaactttccagacgcctgagtccaaaccttcttagcttatggttttcttaggtgatgtgcaaatcaacaaatatatacttttttttttttttttttgagttggagttgcactctatcacccaggctggagtgcagtggcatgatcgtggctcactgcaacctcctcctcccgggttcaagtgattctcgcacctcagcctcctgagtagctgggattacaggtgcccgccactacgcccggctaatttttgtatttttagtagagataaggtttcactatattgaccaggctggtctcaaactcctgacctcaagagatctgcccacctcagcctcccaaagtgctgggattacaggcgtgaaccaccttgcctggccaacatatatataccttttgcaactttgtcagagttgctatgaagaataagttgtatcttgttcacagaaattgcagtctactgggggagctgataaatgttttaaccatccaatgtaacatgttgtcatcaaagagatggtgagactttacacttgtgctaacaaggtagctgttctacataaaagaacatacagtacagatgtagaacttttctgttatcatagaacgttctattggacagtgctaggctgaatgctacagatcttcagagaaaggagaggttatgaggcctggagttgtctagaaagtctttttgccaaagagggatttcaactgggtcccaaataatgggtggaatttgataggtgtaaagaatttgcggtggtttatgcctgtaatcccagcactttgggaggctgaggcaggaggattgcttgagcccaggagtttgagaccagcttgggcaacgtggtaaaactccctctcccctaaaaataaaaaaaattagccaggcctggtggcgtggacctgtagtcccagctactggtgagactaaggtgggaggatcacccaagccccgggggttaaggctgcagtgagccgtgatcccgccaccgcactccagcctgggtgacagagtgagaccctgtctccaaaaaaaaaaaaaattcctggtagcccggtagactaggagggtaagtaggggagaagtgattacttacaaaagacattgaatacaggaccaaggaatttcagttctgttcttttgtaggggaagcttttaaaactttcggggcgccgggcgcggtggctcacgcctgtaatcccagcactttgggaggcccagacgcgcggatcacgaggccaggagatcgagaccatcctggctaacacggtgaaaccccatctctactaaaaatacaaaaaaaagtagccgggcgttgtggcgggcgtctgtagtcccagctactcgggaggctgaggcaggagaagagcgtgaactcgggaggcggagcttgcagtgagccgatatcgcaccactgcactccagcctgggcgacagagcgagactccgtctcaaaaaaaaaaaaaataaataaataaataaataaataaaactttggagccgaagcactgatgtttaatcatagagtgcttactatgtgttaggcacaggcctgattgcctgatgctggttaatttgtacaaagtaaatcagtgcatatgccctctgccctaggggagttattaactggagtctgacattgtacaaaggtaggtatcctgactagtttgatttggtactttgggtgaaaaaagtatagtgtgcttaagtgcagaagtgttttttgaggatttttgattggatacaaaccaccactcatattttatgtctttggcacttaaaaatttcaccataacttttgagtcatttataaaaaccactgaaagagtacttgagggacatccccgaatcctgaagaacttctggtgttctggagcagcctcagtgagatccaggaggatggcattgctgggctggcccagcccttattgattatggtgtaaagaattaatatggtggttatatactctttgttagacaccttggcttacaagacgtaagcgtaaagtgtagtgcgctttagtcagtatggccacatggtcctttggtggtaaattgtttgagatgcctccagtttttaaaaggagtagcatatcgggccaggagcagtggctcatgcctataatcccagcactttggaaggccgaggcaagaggattgcttgagcccaggagttcaagaccagcctgggcaacatagtgagaccactttgtttctttaaaaaaaaaaaaaaggcaaaaacaggctgggcatggtggctgatgcctgtaatcccagcgctttgtgaggcagaggtgagcggatcacttgaggtcaggagtttgagaccagcctggccaacatggtaaaaccccgtctctactaaaaatacaaaaattagccaggtgtggtggcacacgcctgtagttccagctactctggaggctgagccaggagaattgcttgaacctgggaggtggaggctgcagtgagccaagatcctgccactgcactccagactgggggacagagtgagacattctgacagtgctacactgaatgctacatgtcttcagaggaaggagaggttatgaggcctgggaataacatatggaagaatgaatttctgttatggtcagttctcatttgtcatgttaggattactgcaactcttacccagccgggtgtggtggctcatgcctgtaattccagcactttgggaggctgtgggcggatcacgaggtcaggagatcgagaccatcctggctaacacggtgaaactccgcctctactaaaaatacaaaaaattagcccagcgtggtggcagacgcctgtagtcccagctactcaggaggctgaggcaggagaatggcatgagtcctggaggcggagcttgcagtgagctgagatcgtgccactgcactccagcctgggcaacagagtgggactccatctcaaaaaaaaaagaaaaaaaaaaggattaccgcaactctttaattcagatcagcaaacatgttgagagccaggtattgcgtcaggcaggatccaaggataatgaaatattgtccgttttcatgaaactggagatgttgcagggaccgaggtgtgtgctatgccagtatggaagtaggacaggggagacgacagggcagtgagtggttcaagactctggctctgaagtcaaacagatctgggactgaatcctggatctgccacttcctagtcagaatctgagcctctattttcttatctgtaaaagaagattataacagtgcttatcttgtaggtactgttgacgattcaataagataatgtggataaaatgcttagcatagtgcctggcacatagtaagagctcggtaaatctaagttcttactaaatatccaagaaaagagattaattcttttcaggagtgagagaaagtcatcattattgaggggctttatcagatgggaacacctgaatagggttttataggatgaataggaattctttccacgaagttgcgttacaaaaagttgcattcaaggctgaaggaacatgagggtgcagaggcttaaaacagccttgtgtgttcagggagctataagtagaagttcttaatttaggagaactaaaccaaggggaaaggaggccaaggaaccacagttcttatcccttttctgttaataattgggtttaaatgtcattaaaataagttattttgtcctttttagaaaagtaataacatgctattataaaaaaaaagacttgtaggaatataaaatgtgtgttttacatgtatcctgttaattgacttgcttttattcagattttttgcagccctttctgtttaccaggttatcttggagacatatttattccaaattcctttttttttttttttttgagatggagtctcgctctgtcgcccaggctggagtgcagtggcgctatcttggctcattgcaagctccgcctcccgggttcacgccactctcctgcctcagcctcccgagtagctgggactacaggcgcccgccaccacgcccagctaatgtttttttttttatatttttagtagcgacagggtttcaccgtgttagccaggatggtctcaatctcctcacattgtgatccgcctgcctcggcctcccaaagtgctgggattacaggcgtgagccagcacgcctggccttccaaattccttttaacagcctagcaaaagaataataaggaaggtaaatctgcccctacaagaaaataatgcttcgacgatccggctttccttcctgctacccccagccataagaataaatgaccttgctcatcactgaaattttacctgacctttgaatttttaactgcgtcagccaaagaacttatattttgagtattcctaaggtgattgctattgtagttttgaaacacttggttggtatgtttgagggtttcatggtccaaagttactatagcagttaaaagagtggactatcaggtcagacctattgggctttaatcccagttctgccttctcttagaccttgggcctgttgttttcacttctctggttttcagtttctctgtccacaattgtggaaacgaggtccacttgtagagtaattgagaggatgaagcaagatgatgcatatcaagtactttgcatagtgccgggcagacaggtaacattcaagtgctaataattactattattactatttattttttgagacaggttctcactctgtcacctaggctggagtgcagcggtgagatcacagctcatgacagccttgacctcctaggctcaagtgatcctcctgcctcagccttcggggtagctggggctacaggtgtgtgctaccaccctcagctaattttctaatttttttgagtcaggatctcgtcacgttgcctaggctgaattactcttattaaaaactataatatcaggccgagtgcggtggctcacgcctgtaatcccagcactttgggaggccaaggcgggtggatcacctgaggtcaggagttcaagaccagcctgcccaacagagtgagaccccccccgtctctactaaaaatataaaaattagccagttgtggtggtgggcacctgtaatcccagctactcgggaggctgaggcaggataatcgcttgaacccgggaggcggaggttgcggtgaaccgagatcgtgccactgcactacagcctgggtgacagagtgagactctgtctcaaaaaaaccgaaaaacaaaaagcataattagggtggtaacgcttatacataggggcaggtggaataaaacataattaggaggtcgggcatggtggctcacgcctgtaattccagcactttgggaggccgaggcgggtcaggagttcaagaccagcctgcccaacatagtgagaccccgtctctactaaaaatataaaatttagcctgttgtggtggcgggtgcctgtagtcccagctacccgggaggctgaggcaggagaattgcttttgaacccaggaggtgggggttgcagtgagctgagatcgcgccgctgcactccagcctgggagacagagcaagactccgtcacaaaaacaaaaaacaaaaaactgtcatatcaaaaactaaactaaaatggtaatatctgttagatattacaaagtcaggcaaattatgattcatggcagccactaatgacccaaaggagagaaagaataattagcagattctaacctaatgggaaaaaaactaaatgaatagggatgggggacttacattctgttagaggaaattgaggctgtcatataaaaggaataggtaaggcaaactgtaaattcctgtttacacaaatgcccttctgataaatctctgcattgcccacagtccatgattacctctcccttattttaagtaatatttaacacattaaaaatggattaccacccaaggaattgctcccgacccagaaagtgcaggtagtgttgaaggtttgaggggaagaggaatgattagagttggttgtgtctcaggaagaagccaacaggaggaaccttattttgagtcaggtaaagaaggtgggagtgaggaggcatcccggtggccaggtatgaagctgggagctgattgctgcacattactcagctgaattaaatgtgccctcacatctgtgtgtgtgcgtacatgcaaatgtacatgtgtatgagttagttggaggggtagacctttattttcctgtcctgtaactttcctttgcaaactaatctgtattcagaacagtgttgcagttaagaaccacccagcttgtccatgaaacaggttctctcaccccatctccccagttttagagaaggcaggaaagaaaaggcagtgcttttcttttttcctggccgtatgcggggcaggaagaagccagcagagcttgaaagagaaagtaaaccttctgggaaataaacggcttggcttccctattgtggaggaggagtgcaaattattagggggatgtttgggtagtttttgtagaagccatttctgaaaactgatttggattagtgaaggtaagcccaatttaggaaaaccctgcccagtctggtgtcagccacctgtttcccgctttgtttgattgatttgattagtttgtggtattctgacctctcatttttattacaagagttggaagatttgagtctgaacttgagcacctgcttcggtgaaagcttcctaaaatgcatgttttttcacattttttctcatgttcattttgttttgctttttagcaaacactttttctgacagaatctaaaagcattagacttttcttgttttccccttctctccccacaatgtaatcttgaaaacccaaatgttagctgtgtaaattacctctcccgtaaaccaaacaaagtgcaatattgcattgagttagcattgaaatagtcggcctttgaatttttttctacttgtggtttagacataataaatatttcatctcagactgactttctcgacaaatcagttttgcatttgggcctcttttcatcagtatgtttagggaaagcacatttattgaaacattaaccaaaatgaaacataattaggaggccgggagcgatggctcacgcctgtaatcccagcactttgggagaccaaggcatgtggattgcttgaggtcaggagttcaagaccatccttgccgacttggtgaaatcctgtttctactgaaaatacaaaaaactagctgggtgtggtgacgcgtgcctgtaatcccagctactctggaggctaaagcaagagaatcgcttgaacctgggaggcagaggttgcagtgagtcgagatcgtgccactgcactccagcctgggcaacagagactccgtctcaaacaaccaaaaaaacaaaaacaagcataattagggtggtaacgcttatacataggggcaggtggaataattgaagcattctggagccagaaataatcaactgattaagaataatctggctgggtgcggtggctcacgcctgtaatcccagctactcaggaggctgaggcaggagaatcgcttgaacctgggaggtggaggttgcagtgagccgagatcgcgccattgcactccagcctgggctatggagcaagactccatctcaaaaaaaaaaaaaaaaaaaatcctgtttctgcagaaatatcccaggtgtcctgggtcagcagtgccccatagattccacggacgtttaccctaagttttccaatgggagttcatacctctatacccagtgagaatattttctgagtaatgggaatgagattggagatgtagggtagagaagatccatacagtctttgggttaaactttttcctctttgcctaggaaagattaatgctaatcttaaccacagatttgtagtaagaatgtatcagttttgtcattcagttctagactccagttttctttattgtaataccaatattttagagtaaattttgaaatgaatcagtacaaaagatatgtagtaagtggaaagttagtccgcaccttatccttgggactctttcccagggacagctagttacctactatttatctctcctgagttacttcatatgtatgcatgcaaacatgttattctctgggtgttgttccttccatatatagcagcaaatacaccaaactctgtattttgctttttgtcactttatcttagagaatactcaatgcaaatacatgtgtatatacctcatgtttaaaaaatctacatagtaaaattagccaggcatggtagtgtgtgcctgtaatcccagctactcgggaggctgtggtgggagaatcacttgaaccctgagatcacaccactggactccagcctgggccacagagcaagattctgtctcaaaaaacaaaaacaaaaacaaaaaaactacagagtagtattctaggctatgcatatcataaatttgatttcctaatgataggcatagatgatttgcctgggcggcaaattagcgttggctgtgtctcaggaagaagccaacaggaggaaccttattttgagtcaggttccaaagacagaaacattgtctgacatttgtttttgggcttatatgaataaatctgtacacatatatttttaatgttttaatcgtaatatgtatactatttggaaatgtggctttttagttaacagagtgcatgttttaccccattgcacttaaacattaacttggggataattaaatgagtctgtcacttggacaggcaggaattgtaccccccacaaacccataaaccgccaattttttttttttgagacagagcctcattctgttgcccaggctggagtgcagtggtgcgatctgggcccactgtaagctcagcctcccgggttcatgccattctcctgcctcagcctcccaagtagctgggactacaggcgcccgtcacaatgcccggctaattttttgtatttttagtagagtcggggtttcaccatgttagccaggatggtctctatctcctgaccttgtgatccgcccgctttggcctcccaaagtgctggaattacaggtgtgagccaccgcacctggccggtttttttttttttttttgagatggagtcttgctctgttgccaggctggagtgcaatggcatgatctccgctcactgcaacctccacctcccgggttcaagtgattctcctgcctcagcctcctgagtagctgggactacaggcgtgtgccaccacgcacagctaatttttgtaattttagtagagatggggtttcattaataatcattaatattagacaactgtcagactcacagtggtggatacaaactttctcaaattctgatttttactctaaagctcaaattttatcattggcaacaaatattgtcagttgctttccctgaacagacagcttcccttctttcatttttgagaaaatatctgccagtatcccagttggtttatcaatcattctttctctttttttttttgagacggagtctcactctgtcacccaggctggagtgcagtggcatgatctcggctcactgcaacctccacctcccaggttccagcaattctcctgcctcagcctcccgagtagctgggattacaggggctagcagccacacctggctaatttttgcatttttagtagagacagggttttaccatgttggccaggctgatcttgaactcctgacctcatgatatgcccaccttggcctcccaaagtgctgggattacaggtgtgagccattgcgcccggctctattatttcttttctttctttctttttcttttttttttttgagatggagtttcgctcttgttgcccaggctggagtgcaatggcgcgatctcggctcaccacaacctccgcctcccgaattcaagtgattctcttgcctaagcctcccgagtagctgggattacaggcatgtgccaccacacccgtctagttttgtatttttattagagatgggggtttctccatgttggtcaggctggtctcgaactcccaacctcaggagatctgcctgcctcagcctcccaaagtactgggattacagttttgagccacctgacccggtttgcttattatttcttttaaatttaaaaaataataaataaaggggccatgagagcgaagagtttgagaaaggttggtctaaaggttttaacataagaatccctgggttatttgcttaaaaagaagaaagaatctatggatctgcctgagagggtctgatgtagtttatctggggtcatcctcacaggcatagcagatattctgattcagatggtccttggtccttagtttgagaaatgtggctttacaaggcccatagaatataaagtcttctttggattagtgaagtcatgtccacagggtttagaaaatgtttttgttttagagataaaggtaagtggaagagtagacatgtagtgaatgagggaaaatgttttagagatttctttttattctgtttactcttcttggtatgcacgtacctgaatattaaggatattttatgaagtcatgacattaccagattaatgttggttttgttttaaggtactttctgactgctggggttaattcctacagacgattctggtaaagaatagcctttaagttttaaaagtgttgacttatttcagatgtcttaataaagttaacttccagttattacatgtaacgtatataaagctctcattttcctttattctcgttaattgtttgcataacaaattcaaagggaaatttgcttggcagagatcagatagcagagatgagatttaaaaacaggtaatttggctactagcctgggagtttgaagattccaagtttgcatccatgtgtagtcacttaacatttctgtccttatctgtaaatgggaataacacctacttgatagggttgttacattatcttggccacctcaggttctctttggctgagtgattgactggaaaacgcaatgtgaattcatgcttcagactgggttcttttttttttttttttttgagatggagtttcactcttattgcccaggctggagtgcaatggcacgatctcagctcactgcaacctctgcctcccaggttcaagcgattctcctgcctcaggctcccgagtagctgggattacaggcatgcaccaccatgcctggctaatttttttgtatttttagtagagacggggtttcactgtgttggtcagactggtttcaaactcctgacctcaggtgatccacctgcttcagtctcccaaagtgctgggattacaggcatgagccaccgcacccagcccaggctaggttctatatgggtgtgctttttagaatttagatcatgggctatccccaacacaaactggataatgtttctttctagattctctctaagcgtgtattctctttctttcctaggcacagccaccacttcacttacattgtgggattataatttcatgagtagtggaatttccttaaccttctcttgtgtgggagctgaaggacaaaatgagatattctctgaagagtggttacatcatgcaaaactatgatgtgtaatgaggtcacttagttttctaagtacattatacattttgataagattttcatagaaaagcttgtctccttggggagatcactcatcttccatcttgactattatttaaactttatgggtcagatttatctttttaaaaacttaaccataaagctcaattaattttttttttttttttttgagacggagtctcgctctgttgcccaggctggagtgtagtggcgcgatctcggctcactgcaagctctgcctcccaggttcatgccattctcctgcctcagcctcctgactagatgggactacaggcgcccgccacgatgcccggctaattttttgtatttttagtagagacggggtttcaccgtgttaggatggtctcgatctcctgacctcgtgatccacccgcctcggcctcccaaagtgctgggattacaagcgtgagccaccgcgcccggctcaattaatatattttaaaaattaatagactttattatttttattttattttatttttgaggcagagtctcgctctgtcacccaggctgagtgcagtggtgtgatcttggctcactgcaaactccacctcccgggctcaagtgattctcctgcctcagcctcctaagtagctaggattacaggtgcctgccaccatacccggctagtttttgtaattttagtagatacgtgttttctttcttttcttttcttttttttgagatggagtttcactctttttgcccaggctggagtgcaatggcatgatctcggctcactgcaacctccgcctcccaggttcaagtgattctcctgcctcagcctcccaagtagctgagattatagttgtctgccaccacgcctggctaattttttgtatgtttgatagagacagggtttcactatgttagccaggatgtctcgatctcttgacctcgtgatccgcctgccttggcctcccaaagtgctgggattacaggcgtgagccactgcggccagtctagactttattttttaaagcagtgttagttttacagaaaaattatgtggaaagtacagagagtttccatataccccttactttctcccacaacttctattattaacatcttgcattagtatagtacgtcccttacaactaatgaaccaactcgatacattattattaaccaaattcctgagtttattttatttctatttttattttattattattattttttagaggtagggtctcactgtgttgtccaggccaggttgcagtggcatcatcatagcttgctatagcctgaaactcctgggctcaagcaatcctcctgcctcagtctcccaaagtgttggaattacaggtgtgagccactctgtccagcctgaagtccatagtttacattacatttcactctgttgagcattctatggattttgacaaatgtgtgatgatgtatatttgccagtacacaattatataaaatagttttactgccctagaaaccccctgtgctccacctattcattcctctgctgaaccactggcaaccactgatcttttataatatctccatagttttgtcttttccagaatgtcatatagttggacatacagtgtgtagccttttcagattggcttctttcagtaaatgatatgcatttcaggtttcttcatgtttttttgtggcttgataggttgtttcttttcattggtgagtaatactctattgtatggatataccacatgttgtttatcaaacattcacctgaaggatagacatcttggttgcttccaagtttgagcagttatgaataaagctgctataaacattccagtgcaggacttttcacctcctctggataaatatcaaggagtgcaattgctagatcatatggtaagagtatgtttagttttgtaagaagctatcaaactatattcaaagtgactgtaccattatacattcccatcagcagtgagtgagagttcctgttactccacatcttcaccagcatttagtggtgtcagtgttttggattttagccattttaatgggtgtataatggtatacctattaaaattggttttttttggagacagagtttcacagtttcactcttgttgccctggctggagtgcaatggcgcaatctcggctcactgcagcctccgcctcccagtttcaagtgattctcctgcctcagcctcccaagtagctgggattacaggtgcacgccaccatgttctgctaatttttttgtattttagtagagatggggtttcactgtgttacccaggctggtcttgaactcctgagctcaggtaatccacctgcctcagcttcccaaagtgttaggattacaggcatgagccaccgcacctggcctcaatttttttttttttttttttgagacagagttttgctcctgttgaccaggctggagtgcagtggcacaatctcggctcactgcaacctccgcctcctgagttcaagcgattctcctgccacagcctcctgagtagctgggattataggcgcccgccactacgcctggctaattttttttttttttttaattagagacgaggtttctccatgttggtcaggctggtcttgaactccccgttctcaggtgatccgcctgcctcagcctcccaaagtgctgagattacaggtgtgagccaccgtgccccgcctgttttggcttttactgtgaagacgtgttagccgctgtgatgactagcaagtgtggccctccacccagtcgctctgggctcccagctcctgcatcctgctgcaaacttgacatcttccctcaagtaacttgtagttgtctcctgtctacttgcccaaaatataactcttaaacttttctctctgcaagtttgtgcctctctccctgtctgacttccccatctaaataaatggtagaccaccatctactcctttgtgcaagccagaaatctaggaatcatccttaaattccctgttctgtcttatctctgctttcattcaaagcatcagcaaatcctgttggttctacctctgaagttttctcaaatactgttacttgactcatcctgacttttgtttctgctttatgttaggctaaatgccctgaaaactcttttgtacaaaacacctagaaatactggataaactgggcttaacagggaggcccggtgtggtggctcacgcctgtaatcccagaactttgggaggccaaggtgggtggatcacctgaggtcaggagttccagaccagcctggccaatacgtagtgaaaccccacctctactaaaaaaaaaaaaaaaaattagctgggtgttgtggtgcacacctgtaggtggtgcatgcttgaacttgggaggcggaggttgcagcgagctgagatcgcgccactgcacttcagcctgggtgacagagcaggattctgtctcttaaaaaaaaaaacaaaaaaagaaaaacaggaaaatcttcagaagcaaaaaccaaacaatctcaccaaagaaatgagaagatggctgggcgcggtggctcacgcctgtaatcccagcactttgggaggccgaggcgggcagatcacccgagatgggcagatcacccgaggtcaggaattcgagaccagcctggccaatatggtgaaaccccgtctctgctaaaaatacaaaaattagccaggtgtggtggcaggcgcctgtaatcccagctactcaggaggctgaggcaggagaatcgcttgaacctgggaggcggaggttgcagtgagccgagatcatgccactgtactctagcctggacgacagagcaagactctgtctcaaaaaaaaaaaaggctgggtgtggtggctcatgcctataatcctagcactttgggaggccaaggtgggcggatcacttgaggccaggtgaacatggcgaaaccccatctctactaaaaatactaaagttagctgggcatggtggtgggtgcctgtaatcccagctactcgggaggcgaggcaggagaatcgcttgaaccaggaggtggaggttacagtgaaccgagatctcgccaccgcactctagtctgggcgacagagcaagactccgtctcaaaaaacaacaacaaaaaaccaacacatggccaaagtgcagtgacttacatctgtataatcccaatgttttgggaggctgaggcaggaggatcgcttgagtccaggaatttgagaccagcctgggcaacatagacctcatcaccaaaaaaaaaatattttttaattagctgggtttggcagcatgtacctgtagtcctagctactcaggaggctgaggtgggaggatcacttaggcccaggagtttgatagttcgaggttatagtgagctatgatcctgccactgcactccagcctgggccacagagtgagaccctgtctcttagaaacaaaacaaaacaaaaaaaagaaactgaattaaaaacaacaagaacaaaaatgctgctttttgttattgagttgtagcccaagtttcttgagggtaaagcattgaaaagcaggcagtaatagatttgctgtttaaagagatttacttgcagcactattcacaatagcaaagacatggaatcaacctaaatgcccatcagtgacaaattggataaagaaaatgtggtacatacactgtggaatactatgcagccataaaaaacaacgagatcatgtttttgtttgtttgtttgtttgtttgtttttgagatggagtcttgctctattgcccaggctggaatgcaggtggcacgatttcagctcactgcaacctccgcctcccaggttcaagcaattctctgcctcagcctcccgagtagctgggattacaggtgccctccaccatgcctggctaatttttgtatttctagtagagatggggtttcaccgtgttgggcaggctgttcttgaactcctgacctcatgatcctcccacctcggcctcccaaagtgccgggattacgtgtgagccaccgtgctcggctgagatcatgtttttgcaggaacatggatggagctggaggctattatccttagcaaagtaatgcaggaacagaaaaccgaagaccacgtgttctcacttataagtgggagctaaatgataaggacttgtgaacacaaagaaggaaaccacagatactggggtttacttgagggtggagagtgggaggagggagaggaacagaaaagataactattgggtattgggcttaatacttaatattttatcaaaataagctgtacaacaaacccctctgacatgagtttacctatataacaaacttgcacgtgtaaccccaaacctaaaataaaagttaaaaaaaaaaaaaaaggctggttgcattgggaggctgaggcaggcagagcacttgaggccaggaattcgagaccagcttggctaacgtggagaaaccctgtctctactaaaaattcaaaaattagccaggtgtggtggtgcatgcctgcagtcccagctaccagggaggctgaggcaggagaattgcttgaactcaggaggcagaggttgcagtgagctgagattgcaccactgcattccagcctgggcgacagggcgagaccttgtctcaaaaaacaaaacaaaacaaaacaaaaacctgtcactttgggaatatctcaaacctagtcatccaagtggttgtacgattttagtgtctgcatatcaatatttagtgtgatctactttcttagattctcaaatactgccaatgggcacatgtcatgaaataatgtcttttagaggacaagagagtgctaaagtctcattattgcagtttaagaaaaacaattctgtaacagtttaactttataggaaatgccttttgtttatttattttttttcttttgaggcttagatttttatttttatgtttttagagatggggtcttcctatgttacccaggctggccttgaattcctgggctcaagtgatcttcctgcttcagcctcctgagtagctgggactagacgtccactactgctcctggctggaagtttagattttaatttaaactcttctattgggaaactttgtatgtttgctttaccacttaacatttgcatgcattattgtacctattgtctcctacttaaggaagggcagtttatgctgttatatgaagtgaattaacctcctatggtacttcagttttctctatgctaaaagtgtgttctagatttttgaaaaacttacttaattttcattcatttattcaaatatttgagcattctgtagttgctggggaaatagcagtgaactgaagaatgtctttgttcttatggggcttaagttcctagttgatcatattggaaggagatacatgaaaaaagaaatatatgaacaatggagggcgatgagtactgtaaaggagaattcagcaggggagatgttgctgttttagatagaggggtgtcaagagacattgtgcagagacctgaacgaagtgagggagcaagccatggagatatctagggaaagagcctatcaggtggagagaagagtcctagggcagaaacgggcaaggtgtgttccaggagcagagaggggacagctgtgagcaaggggagagttgtagggaaggaggcaaagagagacatctggggcaaaatggattgactggtgggccgtggtaggactttggattttttcctgagtgggttttgagcaggggaatgaaatgatctgactctggttttttttttttttggagacaaaatcttgctctgttgccgaggctgaagtgcagtggcgcaatctcggctcattgcaacatctacttcctgggttcaagctatgctcctgcctcagcctcccgagtagctaggattacaggcttgggccaccatgccggcgaatttctgtttttatttttattttttatttatttttatgtttatgttttttgagacggagtctcgctgtgtcacccaggctggagtgcagtggcgcgatctcagctcactgcaacctctgcctccccggttcaagcaacttctcctgcctcagcctcccgagtagctgagattacaggcgcctgccactacacctggctaatttttgtatttttagtagaaacgggatttcaccttgttggccaggctggtctcgaactcctgaccttaatttatctgctcgccttggcctcccaaagtgctgggatgacaggtttgagccaccgtgccagccaggactcttattttgaaaggatctgtaatgtggagaatagaaggtagagggacaaggatgaaagcatccaggccagttagcctagtccagctatctaggtaagagatgctggtggcctggattaaggctgcgtcagtgggaggttgtgagaaaggctcaccttccttttttttttttttttttttttttgagacaggatcttactctgtctcccaggctggagtgcagtggtgcaatctcagcttactacaacctccgcctcctgggctcaagtgatacccccacctcagcctcccaagtagctgggatcacaggcttgcgccactatatccggctaatttttgtatatttcgtagagacagggttttgccatgttgcctaggctggtctcaaactcctgagctcaagtgatccacccgcctcagcctcctaaagtgctgggattataggcctgagccattgtgcccggtcacttccagattttgaagacagagccaacaggatttgttaatggattaggtgtggcaggaggagggggaggaagagagagagagactggagttgaagttaaggctcatttcaaggtttttagcctcaacatgtgcaggaatggagttgtcacttgctagaatgggggagactggaggagaagccggctgggagaggtttttaatgaaggggttggctttggatacattaagtttgacatgcattttagacatccaggtggagatattgaagaggcagttggctataagtgtctgatgttcatattagcggatggggctagagacataaatttgagaattgtcagtgtataaacgttgttttgaaagaaagtggggctgaataatttagaaaggagtgcatagagaaaataagtttactattaaaatagctttaacaggccgggcacggtggctcatgcctgtaatcccagcactttgggaggctggggtgggcagatcaaaaggtcaggagtttgagaccagcctggccaatatggtgaaaccctgtctctactgaaaatacaaaaattagccaggcgttgtaccgggcacctgtagtcccagctacttgggaggttgaggcaggagaatcacttcaacccgggaggtggaggttgcagtgagccaagatcacgccactgcactccatcctgggcaacagagcaagactccgtctcaaaaaaaaaaacaaaaaaaaacaaaaaaaaaaaactttaacagcaaagcctcttcctttaaaattatgaatttttttcttatggaagttggactctttcattattaagtctacattcaatcactatgttagtaaaaatgttgttctagttgccgaatgcaataaaccagctcagacttagtggcctaaagcagcaatcatttgactatgttcgaagatgccgtgggcaggaatttagataacagcagggatggcttgtctttgctctgcgatgtctgaggtctcactgagaaaactcaagcggctgggggtaataatcatctggaattttctttactcctgtatctgatgtctgggctgcgatgactcaaaggctgatttcagctgagactgtagaccacgtgcctacttgtggcctccccttttgccttgggtttctcacagaatgtggctggttctggagaatgagacttccaatgaaatcaggtggaaatgacatctcgccgctttcagcatgctctattggttggaacagttatggacttagctagattcaaaggaagggaacaaagaccccctcctctcagagagtggggcataatgagagaatttagggccatgttatccaaccaccacaaatgccttctgaatttgaggttctgcctcaaaagttcatagttcctttgactgaaggacttctatatatccaagcatcgtcagccccaggtatattgttccatgtaagtgaccaggactaccttagtatttcgtatagggaaagtgacctgaataaatttgagaaaagaatcttccttctctccagtaagcactgaggtaagcattgagccatattataggtttatgactttgagactcagaaatttaaattcttggccaggcgcagtggctcacgcctgtaaccccaacactttgggaggccaaggcaggcagatcacttgaggtcaggagtttgagaccaacctggccaaaatggtgaaactccatctctacgaaaaatacaaaaattagccaggtgtggtggcgggcacctgtaatcccagctacttgggaggctgaggtaagagaatggcttaagttctctttatctgctttatttcagttgcctctcttagatgaatattaatgacttacatagcattttagatcagtggatgtttttgtgattcttttatttgagctttggccaaagataacagtacccacaggttttttccagctactcgctcttctcccttcagtggccctcgagcctggaaaatctgacatgacaatgtgcttgctcaacctaccactgtttttcttttgaaaagtttggcagcctgtttctgactcctatgaaggtgaattcctcagcattcacagtttattagaaaaatactttgcttctctccaaactcgaaattcaagataaccaaacctatatataggctgatctttcaggatgcagttgtcatgttgatgccatgcttttcagtatcgtggccatcatctgttcagtaggggaggtgtacttctgtaatgggaggtggtggttatgtgtgtgtgcaagtgtttatttggtgtcttaagttagcctgtgggaagttctaaatcaggatggtacgtggttgccagcagagagctgctcctcaagtgaaggaggtagaatcaaagccaataggaaagagcctcagatgcttatatatgtaccgtggggattcagagtgaaagcagtcattggactaggggtggggttagggagagcctgtctgacagacacaagaaagggatggataacgccacccagagaaaaaagcattttaggcaagaacaaatatgaaaaaggaacaaagtctgtgggtggggggcaaggaggagataagttgacttgaaggaagacaacacttatgaaagtcacctggaggctgggtgccatggctcatgcctataatcgcagcactttgggaggccgaggtaggaggacaacttgagcccaggagttcgagaccatcctgggcaacatggtgagactgagtctctaccaaaaaaaaaaaaaaaagaaaattatccagacatggtggcatgtgcctgtaatcccagttactcaggaggctgaggtgggagggttgcttgagcccaggaggttgaggctgcagtgagctgtgatcgtattattgcactccagcctgggtaacagagcaagaccctgtctcaaaaaatgaaagtcatctgtaggctggagagaggaactggaaggggctaaagttggctgagtagttacagagcctgagataagggtaaagattttgcattggacaatgagatgttagtgtgtgtttttgagctggggagtgctgtgattttactcttattgaagaatcactgaaggattattcttgaatcagtgattcttgatcattcttgaatttttcaaacagcaaaactggaagagttggcctattcctcagaatattttctaattgggcgcagtgtcctcacttgggagaacctggctacacactttagttgtaattcactccagtcgttcattcattcaatacctattttttcagcacctattatgagccagacactatgctggatgccagggttcagggtaggacacgctagtgagcaaaagccaagactcttcttgtcttcatggggctttcagtccagcatagtggttatgagtccaagttaatggagtcacagtacttgggtgcaagtcatggtgatggtgatagaaggaaggcatgtgtgagggccagtggcaggcaggagcctggtgtttttgaggacctgaagaaggagcagagtgagtgccaggaacttagccaccagctggtaccagccatacgagaggggcagagccagccaggatgtcggtcatgctagtaatgagtacaaacacttacatgctgcacgctattgggctcctgagtgctacgtgttcattagctcgatgaatttgtacagcaaccctgtgaggtaagcactgttctctcccctttctatagatgaggaaattaaggcacaaagaggataaataactggcaccagctacacgctaagtgatcgaagtggtggaaccaggattcaaatccatgctattctgccttaagataacaaatcttgttttttagcctaagaacagagcagtcatcaggagggttttaagtaggggtgtggcaagatcaagtttgtgtcttgaaaaggtctctctacccacagtgtggaaaatggcctggaggcaagcacacagatgttgggagacagttaacagctcttgccatggccccctatgcattttggctctgatgtttctgcctgatttttctcttgcctctgcctcttttcctgaggggatggcaggttttaccattcagctggagtacaaaccctgaaccctttttggttaaatatctacttgcttttcctacagtattattttgagttgctgtggctgtaatgtcttgagggaatcgagcttgacagtaatttatagaacaaacagtttttagagactgtgtggcccaattgccctctcaatgttggcactcctgccatgacatttaccatgctgagcatgtgaccgccatctgaataccaaatgccacaggaacctgggaggttgtcacttactcctccctttctctgagtcacctttgcccttcagtcagtcaccaagtcccatcacatgtagctctgtaatgtcacagaagatggatgtctgcctcaaaacacttacaatgctgctacctaaattgggcagccacgacctcccaccaggattattgcagcctgagggatctttttgaaatgtaaatcaaactatcacttgtctgtttaaagcttttcaaagacttaccccattgcccttggaagaaagtgcagatatcttgacaggagagccttctccagcctcctcttctgccgtggtctccttgtacagtctctacagtgtactgcttcattagaaccctggagattattatttgctagttctgggctaagaactggcacctggctttgtagagctcctcaggagattctgaggcgtattcagagttgagccctgatctctgctctgatttcgaggttctcgttatatttattaatgatcacgaaaaaatttattattattctttggcctcactttagcatcatctgaggaatttttttttttttttgacagagttttgctcttgttgcccaggctggagtgcaatggcgtgatctcagctcactgcaacctccgcctcccgggttcaagagattctcctgcctcagcctcccaagtagctgaaattacaggcatccaccaccatgcctgctaatgtttttgtattttttagtagaggtgggctttcacagtgttggtcaggctggttttgaactcctgacgtcagctgatccacccacctaggccccccagagtgctgggattacaggtgtgagccaccgtgcccagccgtagctttcgaaatttgaaacctggtcccactgtcagaggttccaatttggcactggtttggttcccaggcatctttcttgctgtatatattttttagtgtcagccagggtggagacctctgtattacttcatggggaagaatttgggagaagatgttgtgaggagacaggttctagtcctagagtgatttatcctttctcgtacagatttccaggtatttgaggggccactcttctgtaattcatgtttttctctcctaacctcactcctgttgcctgcatcttcttgctgagcaaaatattcaaggtcttcaactcctcacaccctggttgtccctccctggatgtgtttggttgttttagtgttccatttcaattttgatacacagaattagaatagcatccagatgtgggtctgttacagctagactactagatccttcaaaatccaagtactagtatgtctattaaaataccataagatcacattggctagttacaatggttggtttgtgggttacttaaaaatcaactaaaattctttttttttttttgagatggagttttgctcttgttgcctaggctggaatgcaatgacacaatcttggctcactgccacctctgcctcccaggttcaagcaattcccctgccttagcctcctgagtagctgggattacaggcatgtgccaccatggccagctaattctgtatttttagtagagatgaggtttttccatgttggtcaggctggtctcgaactcccgacctcaggtgatccacctgcctcagcctcccaaagtgctgggattacaggcgtgagccactgagcctggccaaaattcccactttctaatactcctgtagtagctgggtacggtgggtcacatctgtaatcccagcacttttggaggctgaggctggaggatcgcttgagcctaggagttcgagaccagcctgggcaagatggccagacgccatctctaatttaaaaaaaagaaaaaacaagactcctatagtggtgaagaacagacattccgaaaacagactgtgcgttatgattccagctccatgcctttactacctgtgttgtgactttggataaatcacttaaaaatcttttttttttttttttttttttgagacggagtcttgctctgccgcccaggctggagtgcagtggcgcgatctcggctcactgcaagctctgcctcccaggttcacaccattctcctgcctcagcctcccaagtagctgggactgcaggtgcccgccactacacctggctaattttttgtatttttagtagagacggggtttcaccgtgttagccaggatggtctcgatctcctgtcctcgtgatccacccgcctcagcctctcaaagtgttgggattacaggcgtgagccaccgcacccggccaaatcacttaaaattctgtgcctcagtttctcctctgtaaagtgggataaaaatagtacctatctgatagggttgttacaattatgaaatgagcaaataagtatgtcaagtgtttaaaacagcgcctggcttcttgtaaaaagtgctatataaatcatagctataatcattacttatttcgactgctctttaaccaaggttcttatttttcatctttttcttttgttttgaatatcacttagtgttttcaccttttactctttttaggacctagagccatcctaggtgaaatacgtatggagatatttgatcaggtcaccacccagctctcctgacctcccttctctccttaaattaacatgccaaatcacagcatcactgactccttccctcccgatatgataagagtgtgcattgaaatgcatgtattttacttagcagggaaagctgattagtgattatcacacttaacccctagtgaatctgatggattaacctgctttccaggacactaaggaaatgggtttaagataagaaatatctggctgggtgcggtggctttacgcctgtaatcccagcactttgggaggccgaggtgggcagatcacgaggtcaggtgattgagatcatcctggctaacacgatgaaaccccctctttactaaaaatacaaaaaattagccgggtgtggtggcgggcgcctggagtcccagctactcgggaggctgaggcaagagaatggtgtgaacccaggaggcagagcttgcagtgagctgagattgtgcccaccgcattccagcctgggcaacagagtgagactacatctcaaaaaaaaaaaaaaaaaaagtaagaaatgtccatgaaagggagaccctgggggaaaggaacaataactgcagctctgaggatctggcaccagcagcaccagcacagagggatgctgtacaaccattattgattttaactttacaacagttcttcaaaggagagagagttccctgttttactgaagagaaagcccatttggtagtgaaataccattcccaaagacaaatagctaataaatgtcaggcagggttttgcacccaggcccatccagctcccgtctctactgtcctttcccccacaccacactgatacagaggaatgtgtctggttggggaagtggaagtgttcccaagtggggaggtcatctgatgcacaaatttggtctgttttgtgggttttcttgttttagttttagtttttgtagagctcagacctgttcttaggcagctttaacaatcaactgtgcactcagtaattgacaaatcatgtttgttacttttaatttagagggaattaggtttgttaagctcttgctccttctttagagatggggtctagctctgtcacccaggctggagcgcagtggtatgatcacagctcactgcagtctcaatctgctcaagtgatcctcctgcctcagcctccatgggactacaagcatgggccaccatgctaggctaattttaaaaaaatttttttgtagaggcaaggtctcacggtgttgcccaggctggtcttgaactcctgagctcaagcaatccctcttccaccttggcctctcaaagtgctagaattataggcatgagccaccatgcctggcctttacttctttcatatattcaaattttgtcatattagtagggaactataactcaagttttcttatagattgatgttcatttttacaagcttgatcgtcattggtttttaattttaaagcaaatcctgttatatgtaattgaacattacagtaattatagtaatttgtttcagattgggcactcaagtgttaatattttgtctctttaggaaatcaaaactagatttatatatagacttcttattgcaagtatctagtcttaaatcttacaaaggtactatttggacttaaaactatgaaattgtgtgcttactatataagtgtacttattttgagttatgttttaaacttgaaattccattcttaatgtctagagtaattatgaatggttaaattatgaatgactctaatagtttaaagctacagtatttatttatttatttatttaatttattttttgagatggagtttcgctcttgtcgcccaggctggagtgtagtggcaccatcttggttcactgcaacctctgcctcgcgggttcaagtgattctcctgcctcagcctcccaagtggctgggattacaggtgtatttcaccatgcctggctaatttttgtatttttagtagagacaggcttttgccatgttagcctggctggtctcgaactcctgacctcaggtgacctaccctcctcagcctcccaaggattacaagcatgagccaccacacctggcctacagtattttaatgtggactctctgtcatccattatgctgtttatcctgtggtgaaaattttatgaagattgaatgtttttctctagcgtgaattgctttctcttacttttctcatttttttccttcctaatctacttgcagatacttcagattatttttagaacgtggtatggtgagaacaaataaattggggtttccaaatcttaataaattatgtggccctcagtgggattagcagggttgtattgaaaacaccaatagaaacaaaatagttcttttatgcgctttaaataaaaatttcttttcaggccaggcgcagtggctcacacctgtaatcccagcaccctgggaggctgaggcaggcagatcacctcaggtcaggagtttaagacaagcctggccaacatggtgaagcgccgtctctactaaaaatacaaaaattagccgggtatgatggcgcatgcctgtaatcccagctactccagaggctgaggcatgagaatcacttgaactcaggagatggaggttgcagtgagctgagatggtgccactgcactctagcctgggcaacagagtgagattctgtctcaaacaacaacaacaacaataacaaaacatctcttttcaggccaggtactgtggctcacgcctgtaatcccagcactttgggaggccaaaacaggagggtcgcttgagaccaggagtttgagaccagcttgggcagctggtctctatttgaacaaacaaacaaacaaacacaatactcttttcatagaaaaatgtttactacacaataaactttaaaagaatatgcagctgtattaatgctatgactccaatgtaaaaaaaaaaaaatatatatatatatatacacacacacaaacacattctgaaatagatttaaaggaattacatcaacatgtcaatttttattttttcggagacagggtctcgctgtgtcacccaagctggagtacagtggtgcaatcacagctcactgcagccttgacttcctggcctcaagtgatcctcccccctcagcctcccaaagtgctggggtcacagaccaccacacctggcaacatgtcagtttttgttctgcatagtgggatggtgggatatggatgtttttatcttttattttcttttttatatttttctaaattttccacattgaacattattttataatctttcaaacatatctcttaaaaggactggttcctatagaattcagtgcaagaaatcttctgtgtttctttatactttggttgccttgatcactgggcctttcctgacagcaaagaagaggttagtgtaggcagcagataaaacacaggtatgctctatttaaaatgcatgtatttataataaaagtataggtggtacccaaaggaaaatgtcatgacacattgcaaagtggaacagaagttatctttagatcactttctgttctggattattgtatgagcctgattttcgtctctctttccgccttccctcaccctcgttgtaaatccactagtgcatggatgtgaagtacaagtcttaactttaaaaagttttatgaagctgtgtagtaaatcccttttgtaagtggtcttgactgcgtttctcaatatatcttttggtttcattagattcaagtatataaatgagaactgtaactttggacagactttttcagtcatctttacggtaataagttcccaattagacaatagttatttgttttatgacttgctgttggtaggttatccccaagggactgagaaattcctgttttgaaaagtccaaaaagtctttgatgacttgctgtttcatttttttcttttctcttcagttatagaaaacaggattacacccaccttgcctttgtacagtgcatctactatctgctgacttaacctgagtaaatgctttgaattgagccccatataatgtcctaaggcagcctatatggagtaatgaattgtcttctctcttatgcacccagagtggtagttggcactcaagttgttcctcagataactttgtgtgttctggggctcaatgaagtagttattaagtcacaggcttggggagaacattcatcctatggcattgaatgaagtgttgcccaattctagaatgtctaataaaatttttttaaaaacccacaggcttagaattattccgtagatatgaagtaatgtagttagaacttagtggagttctttagattaacttgtaatttgaaaaaccaaaattgaaattgtgaaataacatgggctctttgaggtcttttccagtaaaacagttacagtaaagctgcttggcagtgattttcctagacactttggctagtcatctcctgtgactgctgttaattaaatatggtttgtagctaagcagcctgtaaggagaagactatggaagtatttgcatattctctccttgaaaatactacctggtctttggctttaagttatacttttattttcccctgtagaataactattaaagtattacctatggtgattagactaagaagtaaaacatgaaatcagtcattgttggtgccctggtgccttcttttttttttttttgagacagagtctcactctgttgcccaggctggagtgcaatggcacgatcttggctcactgcaacctctgcctcccaggttcaagcgattctcctgcctcagcctcccaagtagctgagactacaggcgcccaccaccacgcctggctaatttttgaatttttagtagagacagggtttcactatattggctaggctggtctcaaactcctgaccttgtgatccgcccacctcagcctcccaaagtgctgggattataggtgttagccactgtgcccagcctggtgctttaattttatggaaaaaactactagctggtttctgttttaagaaataacacaggccgggtgccatgacttgcgcttgtactcccagcagtttgggaggccgaggcgggcggatcacgaggtcaggagtttgagaccagcctggccaacatagtgaaaccccgtctctactaaaaatacaaaaattagccgggcgtggtggggcatgcctgtagtcccagctactcgggaggctgaggcaggagaatcgcttgaacctgggaggtggaggctgcagtgagccaagatcgccccactgcacaccagcccgggtgacagtatttcatctcaaaaaaaaaaaaaaaaaaaagaacacaattattgtactacttactagccctcctctgtccccagctaaaaataagaacagcaacaaccaaaaaatccttagttatgtactggaaatgaattagataattttcaataacttacacgtttttaggatatgttagtttgaaaatgcaaatattcatgcatgaccccagtgttaatctatgatggagcaggtatagtgggatgctgtttcatgatttaatttggaccttcagggagtagactgtgatgcctctgcatttgtatccaagacaaataattaaatagtctatttttggctgggcatgatgcctcatgcctgcagtcccagcactttgggaggctgaggtgggaggatcgcttgaggccaggagttcaagatcagtctgggcaacaaaatgagaccttgtctctacaaaaactacaaaaaattagctgaacattgtggcttgtgcccctagtcccagctactcaggtccctgagttaggaggattgcttgagcccaggagttggaggttacagtgatctatatttgccactgcactccagcctgggtgacagagagagaccctgtctcaaaaaataaagtctgtttttaaaattaattttaaacactggagtttattacaaaaagcagttggttctttttttaaatcatttttttttaggagaaccaccgctttttggctacattgtctagagtagcagtgttcaataaaaataagatccaagtcacatatgtaatgttaagttttcttttagtttctttttcttttcttttcttttctcttctttctttctttctttcttttttttttttttgatatgcagtctcactctgttgcccaggctggagtgcagtggcacgatctcggcccactgcaacctccgcctcccgggttcaagcaattctcctgcctcagcctcccgagtagctgggactacaggcatgtgccaccatacccagctaatttttgtatttttagtagagatggagctttgccatgttggccagtctggtctcaaactcctgacctcgggtgatccacatgctttggcctccctaagtgctgggattacaggcatgagccaccatgccctaccaatgttaagttttctagtagccatattaaaagaagtaaaaagaaatgggtgaagttaattttaataatatattttatttaacccaatatatctaaaatattatcatttcaacatgaacaagatactttacattcttttgtttttcactaagtcctcaaaatccagtgtgtattttatattgacagcatagttcagtttgaagcagccacatttcaagtgctcagtagccacatgtggctagtgactccatactggactgtgtaggtttagagtttcagtaaatttgtatgcaatagaatctacataaattggcatattatgcagatttctttgtatgcacatcagttcttgcatagcataagtcaggtcatgatgcttttagtctatgaggcagatttttttttttttttttttgagacagagtctcacttggtcacccaggctggagtgtagatgcacaatcttggctcactgcaacctccatgtgaggcagattttaacttggccctaatgcaaatattgtaagagagatctaatggcctttgatttcttacagagggcaatcaatacatgccatggttacaatgcttcagcatatagtatgcacgtcagccactgcttttactctggctagtgcttagtgtacctgtaccactgcccaggcagcatttgtcctgtggcaggtgaatcttagggtggaaggtggcaagtaacattgcttttttttgagagggagtcttgctgtattgcccaggctggagtgcagtggtgcgatctcggctcactacaacctccacctcccgggttcaagtgattctcctgcctcagcctcctgagtagctgggattacagacggccaccaccatgctcggctaatttttgtatttttagtagagacggggtttcactatgttggccaggctggtctcgaactcctgacctcgtgatccacccgcctcggcctcccaaagttctgggattacaggtgtgagccaccgtgcccagcctacatttttaaattaattaattataagcaggatctcactgtgttggccagactggtcttgaactgataagagttcaagaccagcctaggcaacatggtaaaaccctgtctactaaaaaatacaaaaaaaaaaattagctgggcatggtggtgcgtgcctataatcccagctacttgggaggctgaggcaggaaaatcgcttgaacccgggagactgaagttgcagtgaggtgagattgcaccactgcactccagcctaggcgattccatctcaaaaacaataacaacaaaataacattgttggaatatttagttaatttatagaagcgtattggcctaattggggcaaataccttattctgacattctctctatttgctttactgagctttttcaccagtggaatttaagcccttgatacatgaggagggaaaataccttggagctgtgctgcacatgtaaagtacacaggagatttagaaaacttcgtagcaaaaaaaagagtgtaaagtatctcattaatagtttttgtgggctggacacggtggctcaagcctatactcttggcacattgggaggctgagatgcatgagtctaggagtttgagaccagcctgggcaacacagtaggaccccgtctctacaaaaataatcagccagatgtggtgcgcatctgtagtcccagttacttgagaggctgaggtgggaggatcgtttgagctgggaagttgaggctacagtgagctgtgattgaaccactgcactccagcctgggtgacagagtgcctgtctccaaaaaataaataaataaataataatatgttttgtatgttcatatgttgcaataacattttggatatattaaatgaaataaaatacattaaaattaatttcacctgtttcttttcttttcttttttttttttttttttgagatggagtctcgctatgtcatcaggctggagtgcagtggcacgatctcggctcactgcaacctcctcctcctgggttcaagcgattcttctgcctcagcctccctagtagctgggattaaaggcatgtgccaccacacccagctaatttttgtatttttagtagagacggggtttcaccatattggccaggatggtctcgatctcctgacctcatgatccgcctgccttggcctcccaaagttctgggattacaggcgtgagccactgcacccagcctcttttaactttttaagtatggctaccagaaaatttaaaatgcatgtgtggcctgtattctatttctgttggatgctgctgccttagattattaattattcaatgtaaagactgctgggaggtactacctgcacttccctgaatatatgcttgagagctccaccagccgtcttcacagtagcaagaggggtattctgagtctgtcccccaaagagggagggagaagtgcagccctctcaggttctgtcagaaaacctgatcccaggccaggcgtggtagcttacgcctgtaatcccagcactttgggaggttgaggcaggaggattgcttaagcccaggagttcgagaccagcctgggcaacacagtgaagaccctatctctacaaaaatttttttaaaaaaattagccaggtgcagcaatgctgcctgtactcccagctgcttgggaggctgaggtaggaggattgcctgagcccaggagttagaggttgcaggagttagaggttccacgatcgcacctttcattccgttacatttgctgccttgagaacagaagacctgctggttttgttgccagtttgctcagtcatttttatgaaaaagccagtgctaactaggtgcttcttcgtgccttctctgagaatcaagaactctagtatgtttgcgtgtgttcagtctctcattaaatgttctcactatcccagagaaccatctcattggaccttggtctgtacataccttcatctttggctctgacttgtaattatttttagaacttctctttttttttttttggagacagagttttgctctagttgccagactggaatgcagtggcacgatctcagctcacctcaacctctgccttccaggttcaagcaattctcctgcctcaacctcttgagtagctgtaattacaggcatgtgccaccacgcctggctaattttgtgtttttagtagagacagggtttctccaagttggtcaggctggtctcaaactcccgacctcaggtgatctgcccgccttggcctcccaaagtgctgggattacaggcgtaagccactgcgcctggcctaattttagaacttgttaaaacaacttggcctctattgatatttccatgacccatgctattcagaaagaggattacaggtaattagctggctgggtttctcataccagagcatttcactgggatgttcctgaacctgggacaacttttatgcctggcatttttctttccttctctgttgtcccagactaagcaatttttaaaatagttattatttgttgagtaggagaatctcaggcagatcttcctggatcctcatttatacttttaaacctgtagtcttggaattagtgctctgtcccccaaccccaaacatccaatttctacattttggctacagtacaggtttactgtgtataactaaaagggctgtggaggagaaagaaaggaaccgacatttgttgggcatctgttatgtgccatgcactgagctggatgctgtaggaatatctcaatacctctgaggagtgggaattattatctctattttatagacaagggaatagaaatctgggagttaagtaattttttaatttcacacacttctggtagataatggattctagaacctggcataatagccacttgtcatcccagtgtaaaagagatgtgtggccagatggggtggctcacatatgtaatcccagcactttgggaagccgaggcaggaggatgacttgagcccaggagttcaagaccagcctgggcatgttttgtttgtctcacgaaacattttttaaaaaatgagtgtggcatggtgttgtgtgcctatagtcccagctcctcgggaggctgaggtgggaggatctcttgagcccatgatcatgccattgcactctagcctgggccacagagcaagactctgtcttcaaaaaataataaaaaggagctgtgattatcccaaggtggggattgtgaatgtgtttgtattgttctaaactgggagaaacaggctgggtgtgttggcttatgcctgtaatctcagcactttgggaggccaaggtgggaggatcacttgagtccaggagttcaaggccaccctgggcaacaggcaaaaaatagagaccccatctctattttttaaaaataaaataaactgggagaaagaagcagggtcctccccagagcatctttatccctagtcacagacctgacacctgtgttgggcaatggctacttctagattgtttacccctactgggacttgtggtgaacatatgcacactttggtttacagttgggacccctgattttagcaggatggcccaatggaatcagctacagcagcttgacacacggtacctggagcagctccatcagctctacagtgacagcttcccaatggagctgcggcagtttctggccccttggattgagagtcaagattggtaagtccttcttaagtgactctccaaattgttaggtttcagtttgagtcaagagacatgaactcttaatgtcatgccttgctgttccattaaaaaatgtatgggtacaggtgatggggaaaatgagatcaggagataaaggggcaccctttggtcttgtaaagccttttttatcttagaagggcatgtgggcaactgtctttgacacattgaaaccgcctgtatggtggtggatgtcttgaaggttgatttggacctcatttacttgggcagatcctctatatattctgataatccagtgatgtggtagacatattttttctctgaatgtgaattctgtcatagctagaactttgggttgatacttgtaattcccctttagttaaaggaaggagccacaggggtgtattagtctgttctcaatttgctataaagaaatacctgagactgggtaatttataagaaaagaggtttaatcggctcatagttctgcaggctatataggaagcatagcagcatctgctgctggggaggcctcagcaagcttccaatcatggcggaaggcagagagggagcaggcaggtcacatggccacagcaagagcaagagagcaagggggaggtgccacacacttttaaactatcagatctcacaagaactcactgtctcgaggacagtatcaacagggatggtattaaaccattcatgagaaacccacccccatgatccagtcaccttccaccaggccccacctcaaacagtgggggttacatttcagtatgagatttgggcagggatgtagatccaaactagatcacaggataagggaagtagattccattcatagagcagataatggcacagatgtccagcaactattttcttcactttaatatgctcaggctcactactgattttggtttaattcaggccagtgttaatatgacctggtttttccagaatgcatactctgatttggtgaagggccaggaggtgattcacagatgttggagataggccatcccagcctgggattacttatttgtactaataaatctgaccagagttaattgagggtttaaagcaaaacagcatatctgtctactttgctcaaatattttacaaatacaacagattatgagagtgggtaataatatctggaataattgtttttttgttttgtggtttttttttttttttttttgagatggagtctggctgtagcccaggctggagtgcagtggtacagtctcggctcactgcacctctgcctcttggattcaagcgattctcccgcctcagcctcccgagtagctgggattacaggtgcccaccaccacacctggctaattttttatttttagtagagacagcgtttcaccatgttggccaggttggtctggaactcctgacctcaggtgatccgcctgcctcagcctcccaaagtgctgggattacaggcatgagccaccatgcctggcctggaataattgttaataattattacattgatggcattttattgctgagcaagaagaatctaacatgatgaatgggttatagcatcaggtttgctttgtttttttgtttttttcctctttcttgatggtgatttctgtgtttgtgtgtatgcgtcggcttcagagccattctttatcattcttccttttcctagggcatatgcggccagcaaagaatcacatgccactttggtgtttcataatctcctgggagagattgaccagcagtatagccgcttcctgcaagagtcgaatgttctctatcagcacaatctacgaagaatcaagcagtttcttcaggtatgatgagaaactgaggacaaggagaaacaggacccgcagagtcgggtgttagtgttctttcctggaagcatctcttttctcatttggctaagtaacgagaatctatcttgtattttcaatcacaggagaagtaattagccctttctcaaagctctgtatacttacccgtgagcatcattacctgagaatcacttctcttgtcacagttgaagtaataaagtgattgttatgttaatcatacatgttagcatgttaacgcggtccactgataggaagatgactctcactgttacatgttaaatgtttgaccataatgggatacttcttgactaagtcagtagcttccctgcaagaccaggatagtatactgtgtaaagactcagacaaggccaggcatggtggctcacgcctgtaatcccaacaccttaggaggttgaggtgggaggattgcttgagcctgggagttttgagaccagcttgggcaacataacaagacaccatctctacagaaattttttttaaaaactagctgattgtggtggcatgcacctgtagtcccagctactcagaaggctgaggtgagaaaattgtttgagcctgggaggtcgaagctgcaataagccgtgattgcgccactgcactccagcctggcggacagagtgagagccagtctcaaaaaaaaaaaaaaaagactcaggctaatgtgccttctgttacagaaatagtaacgacctccccttcgccccccgccgacagagagccttcacccaggctctgaagcctttgttccgttgtttcctagaataaatgctttccttgatgaatacattagttttaaggtgccacagttcagtccacatctccatggtctgctgctgatttttattctctttctctcctacttatagagcaggtatcttgagaagccaatggagattgcccggattgtggcccggtgcctgtgggaagaatcacgccttctacagactgcagccactgcggcccaggtgagacctgagacaaaacaaatccctggtctgggaggaatggaaaatcaaacaactttataatgagataaattattagatctactaaaaaagaaggaaaagaaattaaatagatcaataatcataaaaatacattgaaaaactctaaaaaaaaagaaagttccaccccccaaaatacattgaaaaactctaaaaaaaagaaagttccaccaaaagaatccaacagacccaatggtttaaaagttttgttttgttctgacaaattttctttgtttttctttttttttttttctgagacagagttttgctcttgttacccaggctagagtgcaatggcgcgatcttggctcactgcaacctccacctccagggttcaagtgattctcctgcctcagcctcaagagtagctgggattataggcgtgtgccaccacacccagctaattttgtatttttagtagagacggggtttcttcatgttggtcaggctggtctcgaactcctgacctcaggtgatccgcccgcctcagcctcccacagtgctgggattacaggcgtgagccactgtgcccggcctgttctgacaaactttcatagtacagattattccaatatcattcaaacttttccaaagtataggaaaacaagggatgttttcagcttattttatgaggctggaaaaatcctcatatcaaaacctaaaaaacagccaggtgtagtagctcacgcctgtaatcccagcactttgggaggctgagacgggcagattgcctgagcctcaggagttcgagaccagctggggcaatgtagcgagacctcatctctctttttttttttttttgagacagagtctctctctgtcgtccaggctggagtgcagtggtgccatcttagctcactgcaacctccgcctcccaggttcaagcgattctcttgcctcagcctcccgactagctgggactacaggtgtgtgccaccaagcctggctaattttttgtattttttttagtagagatggggtttcaccttgttaggcaggatggtcttgatctcctgacttcatgatccaccggccacagcctcccaaagtgctgggattataggcatgagccaccacgcccagccttttttttttttttgagacagagtcttgctctgttgccaggctggagtgcagtggcgtgatctcagctcactgcaacttctgcctcccaggttcaagctattcccctgcctcagcctcccaagtagctgggactacaggcgcgcgccaccacacccagctaattttttgtgtttttagtagagatggggtttcactgtgttagccaggatggtctcgatctcttgacctcgtgatccgcccgcctcggcctcccaaagtgctgggattacaggcgtgagcaaccgcacctggcttaattaaggatctttctaaacacaagaaagaatatttatcagaaaccaaagggagcatgatgcacagtggtgaaacactattctcagtaaaaacagcaaaagataaggatgtcttttaccattgatacttttctgagggatccagcctatgcaaaaagaaaaagaaatgagggtacaaatattggaaagcaagggacagaactcttattatttacagatagataggtcttcctcgaagatccaagagaaacaaaactaacaataacaattggaactagcaaggtttagaaaggccattgtatacaagataaatatttttagaatctgcagttcccctaatcagtagcagcagtaacctgttagaagatgtaatgaaagtaaagatctgggccaggcacgatgtctcacgcctgtaatccaagcactttgggaggccaaggtgggcagatcatgaggtcaagagattgagaccatcctggccaacatgatgaaaccccatctctactaaaaatacaaaaattagctgggtgtggtggtacgcgcctgtagtcccagctactcgggaagctggggcaggagaatcgcttgaacctgggaggcggaggttgtagtgaaccaagattgcgccactgcactcctgggcgacagagcgagactccgactgaaaaaaaaaaaaaaaaaaaaagaaagatctgattcatagtagtaaaactaaatgtatgcaatttgcatatactattggtatgtatgggaaaatatctggaaacacatatactaaatcattaaagtagtcggtcataggagacttttttactttctgtgaggggttttaccgtctttaatatcctataatcagggacattttttctttttctccgtgaccccctgctttttaaaaaattgtggtgaaatacacataacattacatttcaaatttacctttgtaacctttgttttttttttttttttttgagacagtctcactctgtcacccaggctggagtgcagtggtgtgatcacagctcactgcagcctcaaccacctgggccctagcgatcctcctgcctcagccttatgagtagctgggactacaggcacatgccaccatgcccagctaattttttttttttttttttttggtagagatgggctcttgccatgtttcccaggctggtgttgaactcctgggctcatcaactgatgagaaagagctctccaggcagaaagaagatcatgttcaaagacagaaacagaaatgtgtattcttgggagaagtgtagaaagttcagcatctgattgggtcggggaagacaagctagtcaaggccacatgatgttttaattagtcatgcctaacagtggggccctggaagagcagtttaccacaaggggccaactgcttcggtttgaacccgcagccctgccacttgctctgtaaccttaagtaaacaatttttactctctctgttcctccaatgggagtgataacaataccttcttcatagaattaattcatacatgtaaaatgcttagaacagtatctgacacataaatgcaaaataatttaactgctttctgctgctgctgacatcactatcatcaccctcaccattactgtaggaaatggggacccagtgaagaattttttttttttcttttgagacagagtctcactctgtcacccaggccggagtgcagtgacgcgatttcggcccactgcaacctctgcctctcaggttcaagcgattctcatgtctcagcttcccaagtagctgggattacaggcatgagccaccacactgggctaattttttgtatttttagtgagatagggtttcaccatattggccaggctggtctcaaactcctgacctcaggtgatccatccacctcggcctcccaaagtgctgggattacaggcataagccactgtgtccggccctagtgaggaattttaagcagaaaactgatatgctcaggtgtgagcgaggtggtaggtaacacttactgtgcagtgccctgtagcccaagaggttagcacacaggcatttgctcaggcagcactaggattttctgctgtggaaaacctttgtattttatcctgctccacaagataaaaataagtggtttaagtcaatttggatagaggctccaacttaccatgggaggtaggaaagccaaagttatcccaaggatgttttcaatcgtacggattaggggtctgcaaactgtgagcgtggcccaaatccagcctgctgcttgtttttgtaaatgaggttttttcggaacccagccacactcatttatttatgcattatctgtggctgctttggtgctgcagtggcagggctatttgtggcagggactgtatgacccaggaaaccaaaaatatttaccctctgtcccttagagaaaaagtttgcaacccctgatataaagctataagttggttatttgtggcctcaacccaggcctcactgctattttttctgtttacaatacctggcatgctcttaagtgtctagaattggttaaagatagaagagtggatgtaatccctgctaccaagggctgtcaggctagttgggattataagtacacaaacactcaaagtgagaaaaacacagaaaaggatgtgtgtcattttgtctaaggaagttgaataagatttctcaggaaaagaaacatttgaactgaatttgaaggtgagtgagttcaggtgtgtttgggctgaagcccaggccatgctgagtggatagcgggtgggaagagagtgtggaaacacactgcatgcagggaagagttgggagtctggggtgaccaaggcacagggagggaaagttgaagttatcaattgtgtgaaacagctttctgtgttggcctgagatgtttatagctggaagcagtggggagccaatacagttttttacgaaggtattagaggtgggtttctgtgggtgatcgttaatcatgttttctccctttaagtgtagtcctgcttgagaaatagacatgagaaaggaatgaaggttaaaacatcagctgtattgttggtaaaactagaatggaaagtgtggcttgagctggtaaccataggggctttccaatgcctgtgccctgagttagatcttggggtagagagactggatgtgcagagcagcacccccaccccaccccagccatccatatggagcttcagctgccatagaccaacaaggcagagggataggcctctagacctgcttctagaaaccaggctgctgctcttgcttatggtgggccctaggaaggcaagagtgagaggagggaggcaccagcttaggtgctgggttctttgaagatctgtgtgtacacagagtctttctctccatcttaccaatcagatgagtcactgtcactgtgggaagaagtaggggcatgggtcaccttcccaaaacttctaagaagtttgtattctgtgggcttggatagggaccatgggaaaggaagagaatggttgcccataaaactggctgtagtgtggcctcaaacttctggacttaaatgatcctcccacctcagcctcccaagtagctagaactacaggtatatgccaccatgcccagctagttaaaaaaaaatttttttttttttttggttgagatgaggtctctttctatgttccctgggccggtctcaaactcccagcctcaagtgatcctcctgccttggtttcccaaagtgctaggattataggtgggagctaccatgcctagcccaagcctgtaattttttttttttttttttgagatggagtttcacttttgttgctcaggctggagtgcatggcgcagtcttggctcaccacaacctccacctcccgggttcaggcgattctccttcctcagcctcccgagtagctgggattacaggcatgcaccaccaagctcagctaactttgtatttttagtagagatgggtttctccgtgtcggtcaggctggtctcaaactcctgacctcaggtaatctgcccaccttggcctcccaaagtgctgggattacaggcatcagccaccgcacctggcacgaacctgtaatttttaagtttcatatgctatttattttttgttatttctttaattcattcattcatttattcattcgagatggggcctcactatgttgactaggctagttttgaactcctggcctcaagcagtcctcccacttcagccttcccaagtgctgatattataggtgtgagctgctacatccagccttctttcttctttttctttttccatgtgctatttgacattttccaaggtaccagcctccccttctccccaagataatatcttttaatatggaatttcatccctagggcaggactttttttttattatccctcagaaatatactggacaccacgtttaagtagacatccaacatctgctgtcataaattgttttgaattttttgacatacttgcccatgaggtttttgaaggcatagaccatgtcttagctgaacatgtggtctcttagtgccataaagggggtttatggtatgacctgtgtagtgtcacctgtgtagtgacagcaccactgcctctgtttcccttcctcttgtgatggcagcagcgtctcaagccaaacaagaagggtagttagggtgggatggaagctgggtagaggtattcctctccccatagttctgtgttcacatgtgcattgacctcctttttggcagcaagggggccaggccaaccaccccacagcagccgtggtgacggagaagcagcagatgctggagcagcaccttcaggatgtccggaagagagtgcaggtgatgcaagttacaagcctcgggcagggagctttcattaatttttttttttttttttgagacagggtcttgctctgccactcaggctgggctgcagtggcatgatcacagctcactgcagcctcgacctctcaggcccaagcgatcctcctacctcatcctcccaagtagccgggaccacaggcatgcaccaccacgcccagctaattaaaaaaaaaaaatttgtagagatgggggtctccctgtgttgtccaggctgatcatgaactcctgggctcaagtgatcctcccaactcagcctctcaaagtgctggcattacaggcgtgagccactgcacctggccaacagggagccttctcttggggatactgcctgcaggtcctgcatgtatcttttttgaggttttggcttcatttgaattctcctcagaaactttatattttctgttcccaaggaaatctttctttacttctgtttttttgtttgcttattttaaacaggatctagaacagaaaatgaaagtggtagagaatctccaggatgactttgatttcaactataaaaccctcaagagtcaaggaggcaagtgaatattagagatgttaaaatctctagaaagtgagtttgtgttgttgagttgaaagactcatttgtcttaactctgtttagatcttaaggcgggcggggcgcaagggaggtacgggtcctcaaaggagcctggtcattaaggacaggagtattccctcaggtccaggagtattccctcaggtccaggagtattccctcaggtcaaggagtattccctcaggtcaaggagtattccctcaggtccaggagtattccctcaggtccaggagtattccctcaggtccaggagtattccctcaggtccaggagtattccctcaggtccaggagtattccctcaggtcaaggagtattccctcaggtccaggagtattccctcaggtccaggagtattccctcaggtccaggagtattccctcaggtccaggagtattccctcaggtccaggagtattccctcaggtcaaggagtattccctcaggtccaggagtattccctcaggtccaggagtattccctcaggtccaggagtattccctcaggtcaaggagtattccctcaggtccaggagtattccctcaggtccaggagtattccctcaggtccaggagtattccctcaggtccaggagtattccctcaggtccaggagtattccctcaggtccaggagtattccctcaggtccaggagtattccctcaggtccaggagtattccctcaggtcaaggagtattccctcaggtccaggagtattccctcaggtccaggagtattccctcaggtccaggagtattccctcaggtcaaggagtattccctcaggtcaaggagtattccctcaggtcaaggagttttttcttccttcgcagacatgcaagatctgaatggaaacaaccagtcagtgaccaggcagaagatgcagcagctggaacagatgctcactgcgctggaccagatgcggagagtaagggcataggtcggaccacttcccccatgtgtctcgctcacttgcgggatttcagcgtcttgtggcagaacttgcttggtttctaagaagttcctgctctggagttgactaaagaatgtggttagagacagtctgaggaaatgttttctgactttgttttggtttccaaccagagcatcgtgagtgagctggcggggcttttgtcagcgatggagtacgtgcagaaaactctcacggacgaggagctggctgactggaagaggcggcaacagattgcctgcattggaggcccgcccaacatctgcctagatcggctagaaaactggtaaaggatgaaagaagcttttcctttctttctcgaaagctagattgaattctgatcttaactgcaggcccacagaattggtactatatctccaacgtggggacttttccatattcaaatttagcccaagaattaaagtttttactttatttcggccaggcgctgtggctcacacctgtaatcccagcactttgggagaccaagatgggcggatcacttgaggtcaggagtttgagaccagcctggccaacatggtgaaaacacatctctactaaaaacataaaaaaattagccgggcgtggtggtgcgcacctgtagtcccagctactctgggcggctgaggcaggagaatcacttgaacctgggatatggaagttgcagtgagcggagatcttactaccgcacaccaaccagcctgggagacagagtgagactccatctcaaaaaaataaaaataaaataaagtttttactttatttggagaaactttgttttaaaaaatgtatttatattattatattttaagtatattttacttaataattcaattaaggcttttggtttaactgtatttaacagatagacaaaccttttaattttagttattttagtaatctaaaatgacacatgccctttttaagggaaaaaattcaaatacagaaaattaatcaagagaagaaaaaatttttaaatgaaatcatcagcagtactagtagttaaaatttagttgatgctcaatctagacatctgtcattatgtatatacacattatgtatatacacataaagatagaaatttatacagtttatattaggatcatttttttttctttttttggagtcagggtctcactgtgttacccagtctagagtacagttatgcagtcatggctcactggagccttgacctcctgggctcaggcagtcttcccaccttagccttctcagtagctgggactacaggcatgcaccaccacacctggctaatttttaaattttttatagagacagggtcttactttgttgcctgggctggtctcaaattcctgggctcaagggatcatcccacttcggcctctcaaaagctctggaattatagatgtgagctgccgtgcccagcccaggatcttcctttatatgcttttctgtaatttgcacttttaccttcatccagcatatcttactgcaacccttcctgtgcaaggccctatagtgagcatgttgcaccagcttgccttaggagaaacttgagatacagagcctgcactggaaatttagcgcaactctacatgagaatgcctgtctattcatatcctcactaaccctgagtgttgttaatttactgaaagcagttttaaatgcttcctgaccagggaacgaagaagcttaagttctgggaatgggaggatagaagtgccagaaaagagctcaggagttcagaaatccctgcagcggtccccctccctctcctttcactttctgtctttctggtcttttggtctttgttacactagtgataaaccatcaaagaatgatggaatgatgctaacttctctctttttttaatttttttgagacagagtctcactctgtcacccaggttagagtgcagtggcatgatcttggcttactgcaacctcctcctcccaggttcaagcgattcttagtcacaaccttccaagtagctgggattacaggcccatgccaccatgcctggctatttttttgtattttagtagatcgacctgcctcggcctctcaaatttttgggattacaggtgtcagccactgcacctggcctaatatctctattcttggagatagatttaatgagctttttctccctctctattcacttattccttgtgcatgttatcaatattttgaaacataatgtcatgtcctttgatcagttgaaggctgacattgaaaaggcttatggggattgggtgttgtggctcacgcctgtaaatcccaatgctttgggaggcagagtcgggaggatcacttgaacccaggagtttgagaccagcctgggcaacaaagtgagatcccatccctacaaaaatttaaaaaactagacatgtgccattacacttcagcctgggtgacagagtgagactccatctcaaaaaactaaactaaactaaacaggcatggtggcacacacctatagttctagctactcaggaagctgaggtaggaggatcactcatgtccaggagttggaggaggcagtgagctatgatcatgccattgcactgcactaggccacagagtgggaccctgtctcaaaaaaaaaaaaagaaagaaagaaaagaaagggctcatgtagttcaagcccttctcttcatgcaaggggatgctaaggcccatgatggtgaagggcctggcaaagcttgcacagatagtgtgtgacagagctggctcaaacccatctttgggagctgtctaatctctttttctgagtctttatgttcatagacaagttaggatgagtaaagtaagtgctaaattccatatttcgtgttctgcatatctgggctcagatgcttgtcattttccagtgataactccatcaatgcctcctagtggtataaattttaatacttcttgtgtgcccagccccctcttagaaatttgagattttaggaagggactagtaataaaaggtaaaataaattattttctggccaggcatggtggctcacacctgtaatgccagtacttcgggaggtcgaggcagatggatcacctgaggtcaggagttcaagaccagcctggccaacaaggcaaaatcccatctctactaaaaatgcaaaaattatccgggagtggtggtgggtgcctgtaatcccagctacttgggaggctgaggcaggagaatcacttgaacttgggaggcggaggttgcagtgagctgagactgtgccactgcactccagcctgggcaacagagtaagactctatctcaaaaaaaaaaaaaaaaaaaaaaaggccaggcgcagtggcttacacctgtaatctctcaggaggctcaggcaggagaatcacttgaacccgggaaatggaggttgcagtgagccgagattgcaccactgcactccagctcaaaaaataaataaataaataaattattttctttttttatttattttttcagcatccacccaacatggtgaaaaattcctcttttcttaatgtcactgaactgtaaacttaagatgaaaaattgtaaatttcatgctatatatatttcaccacaataaaaaaattccttgttcttattgtagtggtctccatgtcttcagtatttccttccccttctccatctcacctgtatacattcactttggtaattagcatctttcttaatttattggcaggataacgtcattagcagaatctcaacttcagacccgtcaacaaattaagaaactggaggagttgcagcaaaaagtttcctacaaaggggaccccattgtacagcaccggccgatgctggaggagagaatcgtggagctgtttagaaacttaatgaaaaggtaatttagcatccttgtccctttccctcatctaaaaaatacctaaagactcacgtggtagagtgagaggcgggctgacttctggtcatggccgtggcgcgtgagcccatcttctctttcctcagtgcctttgtggtggagcggcagccctgcatgcccatgcatcctgaccggcccctcgtcatcaagaccggcgtccagttcactactaaagtcaggtaggccatgccacttccatttccagtagagattttactgagggacactgttagggtgagggtagagttggtggccagggtcattctttccaggtgtggtgtcacaggcagtacactgttgcggggttgaaatttgttgccatactatctgcttgctctctgattctgatgtcaaaagcaaaagagcagtcatctttttgaaggtacctgggcatattcctatgattgtagacctggagtctcaggccacagcttctccttctgcccaagggacaaaataatgtcatctattttctgttctttgaggctactcttccctgtggattttaagggaaagagtaaggcttagtgatggggaagctgagaggccccagggcaggtgggtggtgggcctgtagggtgaggtgttactttcacactcaagtcagaacaggtgtgctggggttttgaccttctgcagcaaaatttccctcctcagaaacttagtatggtgttcggtttcaggattaatagaacaaaatgccagctgcacagcatgtgttcctgtaatatttttcattatatggctttgattatccttttgtgaatctctcacaactttaagttgttagttcttagatgttttctcagtacctttggcttgaaggagtgatactcatcttttgtttttgtttgagacagggtctcactctcacccaggctggtgtgcagtggcatgatctcagctcactgcaacctccatctcccaggttcaagtgattcttgtgcctcagcctcctgagtaactgggaatagaggtgcgtgccaccacacccggctaatttttttttttttgagacagagtctcgctctttcggccaggccagagtgcgtgttgcaatctcaactcactgcaacctccacctcccaggttcaagcgattctcctgccttagcctccctgagtagctggaccggcacactccaccatgcccggctaatttttgtatttttagtagagacagggtttctccatgttggccaggctggtctcaaaactcctgacctcagtaatccacccaccccggcctccaaaagtgctgggattacagatgtgagccaccacgctcggcctttttttttttttttttttttttgagatggagtctttctctatcacccaggctagagtgctgaggtgtgatctcggatcactgcagcctctgcctcctgggttcaagtgattctcctgcctcagcctcccaagtagctgggattacaggtacctgccaccatgcccggctgatttttgtatttttagtagagacggggtttcaccatcttggccaggctggtctcgaactcctgaccttgtgatccacctgccttggcctcccaaagtgctgggattacaggtgtgagtcaccgcacccagccctattttaatttttttaaagagagagataggggccaggcacggtggctctcgcctgtaatcccagcactttgggaggccaaggtgggtggatcacctgaggtcgggagttcgagaccatcctgaccaacatggagaaactctgtctctactaaaaatacaaaattagctgagcgtggtggcgcgcgcctgtaatcccagctacttgagaggctgaggcaggagaatcacttgaacccaggaggcggaggttgcggtgaacggagattgcgccattgcactccagcctgggtaacgagagaaactgtctcaaaaaaaaaaaaagagaaagagagataggatctcgctctgtcatctaggctagagtgcagtggcatgatcatagatcactgtagccttgaactcctgggcacaagtgatcctcttgcctcagcctcccgagtaactgcgactacaggtacatgctaccacaccccgctaatttttaaattttttatagatgtgggctctcactttgttgcccagactgttatggaactcctgggctcaagggatcctcccagcttggcctcccacagtgctgagattatagatgtgagcctgtaattatagacagcttggcctatttacctgttggaaatgaagaattatgaattttacatttcttcaagaaaaggttatgggagagttactgactttttttccttggattttttctttttaaataggttgctggtcaaattccctgagttgaattatcagcttaaaattaaagtgtgcattgacaagtaagtactcctatcttagctctgtttttcaaatgaggaatagaaaaatgagaactttgacagacatcatttgaactagagactctgtctttattcagagatcttcattttgtggacaaaagttttcaaaagccttggggtgcattgtcatttacgtgtctgaacaaagccacaaagctgggggtacagatttgatttgtggttgctattgtgacaaccagtccctcttttccttgtttagttttttacttgtacatgtcattcatgcatattatatataagactgagatcatgtgttaattaacgactgggatacgttctgcaaaatgtatcattaggcaattttgttgtgcaaatgttgtagagtatatagtccttacacaaacctgggtggcagaacctactgcacacctacgctatgtggcagagcctactggtcgtaggctgtaaacctgtacagtatgttactgtgctgaataccgtaggcaattgtaacacatctcaatgaagtaggaatttttcagctccatgataatcttatgggaccaccatcatatatgcattttgttgttgaccgaaacgtcgttatatattctttccatacatagcatgtggaaagaatagatctcttttttttaattgttccacactttaccatataatggaatacgcaaaatttcacaatacctttcaggatgtaaaatacatataccctttgacgacattagaaaagagaaaatgtgggccgggcgcggtggctcatgcctgtaatcccagcactttgggaggccgaggcgggcggatcacgaggtcaggagatcgagaccatcctgggtaacacggtgaaaccccgtctctactaaaaatacaaaaaaactagctgggcgtggtggcgggcacctgtagtcccagctactcaggaggctgaggcaggagaatggcatgaacctgggaggtggagtttgcagtgagccaagatcacaccactgcactccagcctgggcgacagagactccatctcaaaaaaaaaaaaaaagaaaagaaaagagaaaatgtggctgggcgcggtggctcacgcctgtaatctcagcactttgggaggctgaggtgggcagatcacctgaggtcgagagttcgaaaccagcccgaccaacatggagaaaccttgtctctactaaaaatacaaaattagccaggtgtgttggcgcatgcccgtaatcccagctacacgggaggctgaggcaggagaatcacttgaactcaggaggtggaggttgtggtgagccgagatcacaccattgcactccagcctgggcaacaagagcgaaactatctcaaaaaaaaaaaaagaaaaaagaaaagataaaatgcattcttatttttagttgatgtaattatgtggaaatttcatgaggatgcactggaaaataatgaaataagggagttgacgaaggtggtaggtttaataagtacatatgcaatatgaaacataggttccccttcctatggggaggcaaccaactgtgcctgctacgcagaggtgttatgttgcgctgatcaactgtaactgaatagtttaaagaaatgcccaggagcacagaggttttttcatgacagtaaataacaggtggtcaaagtaggctttttgaagaaacacagagcctattttattaacaacagtctgtgttcttacagagactctggggacgttgcagctctcagagggtaagttcagcctagaggcttccttttgttccgtttaacctaacttcatcctccggctacttggtcacctacatagttgattgttcccctgtgattcagatcccggaaatttaacattctgggcacaaacacaaaagtgatgaacatggaagaatccaacaacggcagcctctctgcagaattcaaacacttggtatgtgggaggagctccccttcacaaagggcctctggctgccggagagggctagggagagcctcacaggacacctgcctttttcttttcttacagaccctgagggagcagagatgtgggaatgggggccgagccaattgtgatgtaagttttgttggggatgaaagacaactggggtgttttccttgagggagagaggggtaaagatccttcttaatccccagaattagaaacatcaacctgttctttcagctgtagttattccaaaaagtcacttcaggccaaagtgacatgaacagaagttccatgtgccatggagctctctggcttggaacatttccgtgaatatctgggagttggctcctccttaaggagaagtggaaagtcccttgctgagttgttctccacacccatgtggtataaagcagctttccaccttgcctggggctttccaaattccccatccagctcctgcggctgaccctgcttggctccatttttagtgccctgtttttctctcccactgaggtgggatagagggtgtaaaagcaacagatttgagttaaactttaaaataaatgaccaccttgcattagcttgcttaggaaaagagtacataaaataaaatgaacaaacaaaaacccatcttgttctttatcccccttattttctgcttttcattgattcagattattggattcttattgtcaagaataaactttaaacaaacaaacaaaaaaaggtaaatgtgacggaaggctagttttcagtcatttttaaaaattgtgatgccccgttctttttcttacatttgtcccctgaacaattcttcctctttaaaatgtagcagtcctagctgggcgtgctggctcacaccccgtactttgggatgccaaggcaggctggtcacttgaggtcaggagttcaagaccagcctggccaacatggtgaaagcccgtctctactaaagatacaaaaattagctgggtgtggtggtgcacgcctgtagtcccagttactggggaggctgaggcatgagaatcgcttgaacctgagaggtggagcttgcagtgagccaagattttgccactgcactctagcctgggcaacagagtgaaactctgtctcaaaaaaataaataaaataaaatgtagcagtcctttttaaaaatgtggaattttacttgacagtagagtgaagtagcctgtatgcaatgatatgggaaaatgtacatgacatattaagaaaaagcaaaatgtaaaataatttgaatagtattattagtatatgtgttttaaaaatacactatactcttatgtgtattcatatgtatattaagaaattctggaggaatataccagcagtgctatgtgtattagtgctgctgttggtatccatggctattctagactgtctctgtgatatttgcattttaaactgaatatattacttttataatcagaaaaatagtattaaaaatgaattataatttaatttcttttttcttttttttttttgagtcggagtctcgttctatcggattgcagtggtgcgatctcagctcactgcaacctctgcctcctaggttcaagcgattctcctgtctcagcctcccaagtagctgggacgataggtgcatgccaccacgcctggctaatttttgcatttttagtagagacagggtttcaccatattggtcaggctggtcttgaactcctgacctcgtgatccacccatctcggcctccgaaagtgctgggattacaggcatgagccgctgtgcccagactagaattcaatttttgagaattcattgacaactcttacttaaaataaggttgctgtactgatgtgagacattgttgtagtcagtttggaaaacaatttggcagtataaaaatgaacatacctgtaaaccaacggtgccattcccaggatttaatagcagagaaatctttgcatatatgtcccaggagacatatataaagtggacatcagcctgattataagctctaaatgcaacccaaataaatacccatcaacattagaatgaatacattatttgtggtatagacacaatggaatactccgcagctgtgaaaaggaatacactgcagatacacataaccatgtggattcatttcacatcaagtgaaaagtgaatcccaaaagaattcattggagtccataagtgtaaggttcacaaatgtcccaaactaaacaatacctgcattgcttagataaacaaatatggtaaaactgtaaaaaaacaaaacaaaacaagacaaaaagggctaggaaatgataaacccaaaagacaaaatagcagttatttctgagggaggagggaaggggatggggttggggaagggcacccagagaattttaggagtgatggacttttccttaaattgaatggtgggttcatattgttttgttattctttgtgccttacgtattttacaaataaccaattggatctatgtaatattataatacaaactgagtaaaggattaggttgaggatcacagcattggaagttcttggtgttgaagagagtaagtgccgagcaagttgtgtccctggcagtttgtttgtgaccacctggtggcttacccttcttggtgtggtgaggcttggcatgtcactttccttggctgtggctgttagtactgaatgccattctctctgaggaaaagtgtccttctcttttttattgattgactgattgattgagacagagtctcactctgtcacccaggctggagtgcagtggcgtgatctcggctcactgcatcctctgcctcctgggttcaagcgattctcctgcctcagcctcctgagtagctgggactacaggcgcccactaccacacccagctaatttttgtattcttagtagaaacggggtttcaccaaattattggccaggctggtctcgaactcctgaccatgtgatccacctgcctcggcctcccaaaatgctgggattgtaggtgtgagccatcacgctcagcctttttttttatttaatttaatttttttttaagacagggtctcactctgtcaccccagctagagtgcagtggcacaatcatagctcgctgcagcctccatctcctaggctcaagccatcctcccacctcagcctctcgagtagctggggctataggtgtgcaccaccacacccagctaatttttgtattttttgcagagatggagttttgctgtgctgcttagactggtctcgaactcctgggctcaggcaatcctcctgccttggcctcccaaagtgctgggattacaggcatgagccaccacacctggcctaagagtgtccttctcgttactgtaggcttccctgattgtgactgaggagctgcacctgatcacctttgagaccgaggtgtatcaccaaggcctcaagattgacctagaggtaagttctgcagcagaatcggtgagaggctacgtacaggggtgactcaggacaaaaacttccactgggatttttacaagagaaggtggaatgattactgtttgcttaacactgtgtttatttttgcttacttttctccaaaaaaatccttggcatcccatctggcaataaagtcttgcttgaatgcttagaagatgtgtgtatattcagctttcagcaaacttgatatgaaaatctctatttagaaattgattggccgggcgcggtggctcacgcctgtaatcccagcactttgggaggctgaggcgggtggatcacgaggtcaggagttcgagaccagcctggccaacatgacgaaaccccgtctctactaaaatacaaaaattagctgggtatggtggcggacgcctataatcccagctactcgggaggctgaggcaggagaatcacttgaacctgggaggcagaggttgcagtgagctgagattgtgccattgcactccagcctgggtgacagagtgagactccgtctcaaaaaaaaaaaaaagaaattagaactgactttataaagtttgggcataagagtcttagcagccagtgtgtttagtatacagaaaattgtggcaatgacattctcctttcccaactttcttgatttttaaattaagatatacctagaaaagcaggaatcctggtctttgattcctgagacctccctgtttcatgtgaagatacagcttcaagtcttggagaatgcctccaaggtcttaaaaatggggaatctgtggattgtgagtcaagctttgagcaagtcaggttttacaagggaccggtatattccgactgcagcctgagttgtgtggccacgctgggcattctttccactatgagtgctcactgagctgactcactcacactcctcgcctagagttggcagcaggtgtggtttatggcatgtcctttcattctgagccccgtgagatgcgggtgaagagatttccaaggctgtgagagcccctctgcctccccagctcagtccccactccctccgcagacccactccttgccagttgtggtgatctccaacatctgtcagatgccaaatgcctgggcgtccatcctgtggtacaacatgctgaccaacaatcccaaggttagtgccccctccttttagttggtgccccgggatctcttgcgacttaggggtacctagtatagacaatgagcaccatccctcatctaaacaagcaaatgtgttctttccaatagaatgtaaacttttttaccaagcccccaattggaacctgggatcaagtggccgaggtcctgagctggcagttctcctccaccaccaagcgaggactgagcatcgagcagctgactacactggcagagaaactcttgggtccgcatttcaccccttctccctcccgcccacccgcccagaaaagggatccggcccatagggctgttcatttgggccatgtctactgagcattaggccatgtttctttcctgagcaaggcgctgtgctggtgccaggaaacaggggagttggggagttggggtgcagagacagtttgcagttttcagtcgaggtgatcatttttgaggtgggaggtagatttcttttctcctggttgctgtctcattcacccactctatctaactttagaagatcttttaagtgtgtgttggaaggtggcactaaaggcttgacattccctgtccatttttttaataaactataggctagttggttttttttgtcttattttatttatttatttatttttttgagacgagtcttgctctgttgcccaggctggagtgcagtagtgtgatctcggctcactgcaacctccgccttctgggttcaagcgattcttctgcctcggcctcccgagtagctgagactacaggtgctcaccaccacgcccagctaatttttgtatttttagtagagacggggttttaccatgttggccaggatagtctccgtctcttcacctcgtgatccgcccacctcggcctcctaaagtgctgggattacaggcttgagccactgtgcccagcgtaggctagtttttaaaaaagaattagtggaatattttatgtgccacctgggctagaagtagctttgttctaataaagctgttgccaccaaatacacctgtctgacacccgatgtcagcttgttagtgagtgctgctgttggttcccagcctaccacccgaggttgggaagagcagggggacttgttatatcaccctccatccctgctgggctacccagcaacacaagtgagtcaaatgatgggatagtgtttgtcctcatgtgcacacacacaacagtgcctaccttcaaagatgtgaaagctgattattttgtggcccattgtgggatgaatgtgtgtgtgttctgttttaagaaataacctcttgaccccaagctgaaaatgtactacttgactctttttctttccttcaggacctggtgtgaattattcagggtgtcagatcacatgggctaaattttgcaaagtaagcaatcttgttaaattctcgtgggaatgggaatgctcacctgcacggctgtcgttgagggctctggcttgaaggccctgaactcttggtccagcggccagtaggacctgcctgaaggtagacgggcctgaggatttgggtgatgcactgcacccctaggaagggaagggctgggatggcagtagacttggctttcccattactcttttctccaggaaaacatggctggcaagggcttctccttctgggtctggctggacaatatcattgaccttgtgaaaaagtacatcctggccctttggaacgaagggtaggttggacagagtgtgcacagatgtaaccaagtcccctgctctcagcaagccagtggcaggggatggatgccctgttagcaataacaacattgttcctcctccttggctccaggtacatcatgggctttatcagtaaggagcgggagcgggccatcttgagcactaagcctccaggcaccttcctgctaagattcagtgaaagcagcaaagaaggaggcgtcactttcacttgggtggagaaggacatcagcggtaagggaggctcccacccaccccacctgctggtggctgctgaggcctcatcactgcttctagttgcaagcacctactgccccctggtgggtggagatggccttgactccctgtttcactcagactcgcaaaacacatttgcgtgacttctaaatccttccagctgaaggattggtttgctttgttttgcttgctccagtgactatttgttgagaattttgcaatttaaattgtattcttcatctctttttctacttaaccctgttaatatatcttacgcaagtagttatattcaagtttattttctatgacccaactagtagcctcttcttaattagaagccagcctgaatatttccacagtgccaggccactgaacagggtgttcagggtctcaacactagggtggcttaagtcttttccccttcgaggaaagaaaaaatgggcagttttctctgagatgacctagctgtaggttccatgatctttccttcccatgtcctgtgacaggtaagacccagatccagtccgtggaaccatacacaaagcagcagctgaacaacatgtcatttgctgaaatcatcatgggctataagatcatggatgctaccaatatcctggtgtctccactggtctatctctatcctgacattcccaaggaggaggcattcggaaagtattgtcggccagagagccaggagcatcctgaagctgacccaggtagttgttgattttccatgttcctggcatttaatttttgggaaaagttggaaattttgggatccttggaggatagataggcaaatgcctgaataacctgggggataattatttctccttatgggaaagaattgtagtgagtgcttttgttggggtgaccgatgggatttgagaggagaatcagaatcacttagagtagtgtagttcctgctccacagagagtgcatgagtctaaagaggggatacagcctgggcaatatggtgaaacctcgtctctacaaaaaatccaaaaaaattacccggtgtggtggcacgcatttgtagtcgtagctacttgggaggctgaggtgggaggatcacctgagccaaggagttcaaggctgtagtgagcggtgatcatgccaccgcactccagcctggctgatagagtgagatactgtgtcaaaaaataaaaataaagaggggatcaatacacatacgtcccccaaaacatgcctgaaacacgagaagggaaagtgagggcagttaacaggatgccctgctggcacagtgcttcttagtagatgctagaaggtttgaggcccagatttcagcccagcatatggctttttgcctgtaactgaaccatgtcagtgtgccagatggtctgaagaaagggtttctggaggaaattattattagctgcatgggagtatggtttacactagagtagaagagctgggagcatcacgtttgaaggggaagacagtgactgggtggaggggcaagggattagtatttagagtgtgcaactattgaaaataaggtatattttaatgtgtaagaggacatgtacttatatgttatatataaattattttagctgggtgaagtggctcatgcctatagtcctagcactttgggaggcccaggcgggaggatcacttgagcctgggagtttgagaacagcctagacaacatagtgagaccctatctatacaaaaataattttttttaaattagccacgtgtggtggtttgtgcctgtagtcctagctactcgggaggctgaggtgggaggattgcttaagcccaggaggttgaggctgcagtgagccatgatcgcaccactgcactccagcctgggtgacagagcaagaccttgactcaccaaaaaaaaaaaaaaaaaaaagagagagaaattaaaaatactgtaatctcagctgggcatgggggttcacacctgcagtcctagcactttgggaggctgaagcaggaggatcacttgaggccaggaactcaagaccagcctggcaacatagcaagaccccactacacacacacacacacacacacacaaagaagagaaagaaaaaaacgaaacaaaactgtaatctctgcagctgtcctcagtgtggagggggtagccctgtctgttccccttcagcacttgctgttttgactctctgggttctttgtgcaggtcttgatggggagtctctggtttgccattctttgtttgatttaactttctgtaatcataaagccaatgatgggctttttttttttttttttttttagactaagtcttgctctatcacccaagctggagtgcagtggcaccatctcggctcactgcaacctccacctcccggttcaagcaattctcctgcctcagcctcccgagtagctgggattatgggcttgtgccaccatgcccagctgatttttgtattttttgtagagaaagggtttcgccatgttggccaggctggcctcgaactcctgacctcaggtgatctgcccacttcagcctcccaaagtgctgggattacaggcgtgagccactgtgcctggcctaatgatgggctctttaatgtgatcctttagggttggcgccttgccctagttgctgttgaaaaaactatttttgtccaaatagcacacacacagaaacctaccaacttccctcccactttttcctaggaattccttctgagggatttcttgagatggggcagaatggggcttggaagagggagttggagctaattgaccgttgcctttctcctttgttggggtcctgagtcttgttcctgctgtaagagttactcacttcctgtctgccacctatctccctttgcatgtgtgcttcagttgggagatctgtttatcagcccctgccacacggctctttgttccttctgcagaggacgttggggtcccacggctggtccttttgactcattttgctttcaaggtcccacctcccagtctgaggctgcatcctccattaccatcgcccttcctgtgggctgggaggccaggtcctttcctgcccagcgatgtcagcgtttcctcaggggccaggcactcatcaggagaaaggaactaattacttgagtaatttgccttgccttgctgagaggagtgtgccctgagggactccatgtgagtgtggtgacgggtgtgggggtgtccctgtgttattttaaaatgggtgccttcaggacgatgagcatgtgaccatttcctctctatttccatcacaagagtattatggtatgagggtctcaggttagattatcctcccaagactcttctctcttccttctctactggaagcccacatagcatttccttatggcttgagggagaggttcggagccacttacaaattagataaagtacatttacaatcttgtacaaagccacacaatgaagtcatttttctcagctttttttttttttttttttttttttttgagcctgagtctcgctctatcgtccagactggagtgcagtggcgcgatcttgcttcactgaaacctctgcctcccaggttcaagagattctcatacctcagcctcctgagtagctgggattacagacatgcaccactatgcctggctaatttttggatttttagtagagaccgggtttcaccctgttggccaggctggtctcgaacccctgacctcaagtgatcttcccgcctgggcctcccaaagtgctgggattataggtgtgagccacagtgcccagccttgtttttgtttttgttttgttttgacagtctgtcactctgtcacccaggctggagtgcagtggtgcgatctcacctcacttcagcctctgcctcccaggttcaagtgattctcctgtctcagcctcctgagtagctgggattacaggcgtgccaccacgcccagctatttttgtaatttcattaaagacagggtttccccatgttggtgaggctggtcttgaactcctggcctcaagtgatccacctgcttcagcctcccaaagtgcagggattacaggcatgagccactgtgcctggcctcagctatcttgaatgctggagaattaaatccttttctgtctagggtgtcagctccctaagggctgggccaaaacagttggatttataagacactagagtcttgcctcagtagctcctttgaattctgcactgaattgatcagtttcttggcccaaagtaaactcagatggcagcccaagagccactctgcagtgccttctttcacatggtcatcatgctctctgatccctcaggttctgtctaagcctcatgttttatgaccgtgctgttctcagcccacctcaccctgccccatgccttctcaatggtttgttcacctgaattccccagatttcatgccagtatccccaaggttccttgacctcttggtgtaagcattcagcatctaaaattcattttattcccgtcaacgcatttctaactgtagaacaagaattataaatgacaaagctcatagaaaattggcaccttgtcttccccctccctcttattttatacataaaagagaatatgggctgggcattgtggccaaggctgggcatgatagctcatacttgtaatccagcactttgggagggtgaggcagatggatcacctgaggtcaggagttcaagaccagcctggccaacatggtgaaacctcatctctactaaaattacaaaaaaaaaattagctaggcatggtggcagatgcctgtaatccagctactcaggaggctgatgaaggagaatcacttgaaccctggaggcagaggttgtagagagccaagatggcgctactgcactccaacctgggcgaaagagagcaagactccgtctcaaaaaaaaaaaagacaaaaattagccaggcatggtggtgccacctgtagtcccagctgcttgggagcctaaggcaggagaatcgttttgacctgggagtaggaggttgcggtaaccgagattgtgccactgcacttgagcctgggcaacagagtgagactctgtctcaaaacaataagaacaacagcaacaaaagagagagaccatgccttgctccaggtctcttagctattgaagatgtacctggacccaggtctccggtcttctagttgaagcaattgtactgccttacaaagtcacattctctttggtgctttttgattgacgtatttatccaactagaaagttactcatgccctcatccaaaaatgtggtagaggccagattagtgctggtaggaataagagatataacctttggctttggaaccacaagcattagcagtctccatgttctttaaagacttggtgatattggtatttaggctggacaccatgcaaagactacacaggctcggttcctgcatgcagagaagttatctaagagatatgaccaggccggaatagaatgctcagaccacgtggaggctgttaaacttttacataatctagggaaagaagggacacaaggtggcattagtctagggtcaggtgggaaaaggttatgctgaaaagtctctgcagctcaggacagctttgtgcaaagaactgaagttcacagctgctagtgcctgggagatcaaatagtataaatgagggcagacaaccctgaggggcagatggagctttccagacaatcttggcatgaggatgagtgagtttcaaatcagtcctgccgaggcagatggcttcctccagctctgcttactgaatgcgaagtcacagtcagtaagaaaactggttttcttcttcccaggcgctgccccatacctgaagaccaagtttatctgtgtgacaccgtaagtggcttcctttccccgttttgccttcatttctaatatcctcagttatccctgggaatgggacactgggtgagagttaatctgccaaaggttggaagcccctgggctatgtttagtactcaaagtgaccttgtgtgtttaaaaagcttgagcttttatttttctgttggagaccagagtttgatggcttgtgtgtgtgtgttttgttcttttttttttttccattgtgtcttgtcaaccccccgtttcccctcctgctgccccccatttcctacagaacgacctgcagcaataccattgacctgccgatgtccccccgcactttagattcattgatgcagtttggaaataatggtgaaggtgctgaaccctcagcaggagggcagtttggtgagtatttggttgacagactttgtccctataagggaagttggtcccctttgtgtgatgctctcacatgtacacaccgagagctggtcactcggaatggtaggagattctagagctttgctttccaaaagagatggtatgaatgccacatgtgtgagtataaatcttctagcagccacactggaaatagacgaacttaatttttacaatatattttatttaacccactaaatccaacatactctcaatttaacatttcagaaaaagttgaggctgggtgagtggctcatgcctgtaatcccagcactttgggaggccgaggtgggtggatcacttgaggtcaggagttcgagaccagtctgaccaaaatctctaaaatataaaaattagctgggcatggtggcgcatacctgtaatcccagctactcaagaagctgaggtgggaggatcgcttgagcctgggaggtggaggttgcagtgagcagagatcgtgccactgcactccagcctgggcgacagagtgagactccatctcaaataaacaaaactaaactaaaaagaaaaagttgagacctttttttattcttttttttcatactaagcctttaaaatccagtgggcttttgacagccacagcacagctcagtttggacaaaccaaatctcaaatgcttggtggccacgtgtgtctcggggctcctgaattaaacagtagatcaagggcagaagatctcaggacagccttagagcttctgtaaacatggagctctgggaatcagttaaggtgggaatgagaaaggacccttcccgaggcagggtcctccagggaggagggtaaatctggcttttctgaccatccctgggccttaaggggcaggagattggatagcagtggtagcctgggccctgtcctctgaagggctgggggcgtggcctgccagttgcagagggtggacaactgaactagttttccctgtctgtccctccagagtccctcacctttgacatggagttgacctcggagtgcgctacctcccccatgtgaggagctgagaacggaagctgcagaaagatacgactgaggcgcctacctgcattctgccacccctcacacagccaaaccccagatcatctgaaactactaactttgtggttccagattttttttaatctcctacttctgctatctttgagcaatctgggcacttttaaaaatagagaaatgagtgaatgtgggtgatctgcttttatctaaatgcaaataaggatgtgttctctgagacccatgatcaggggatgtggcggggggtggctagagggagaaaaaggaaatgtcttgtgttgttttgttcccctgccctcctttctcagcagctttttgttattgttgttgttgttcttagacaagtgcctcctggtgcctgcggcatccttctgcctgtttctgtaagcaaatgccacaggccacctatagctacatactcctggcattgcactttttaaccttgctgacatccaaatagaagataggactatctaagccctaggtttctttttaaattaagaaataataacaattaaagggcaaaaaacactgtatcagcatagcctttctgtatttaagaaacttaagcagccgggcatggtggctcacgcctgtaatcccagcactttgggaggccgaggcggatcataaggtcaggagatcaagaccatcctggctaacacggtgaaaccccgtctctactaaaagtacaaaaaattagctgggtgtggtggtgggcgcctgtagtcccagctactcgggaggctgaggcaggagaatcgcttgaacctgagaggcggaggttgcagtgagccaaaattgcaccactgcacactgcactccatcctgggcgacagtctgagactctgtctcaaaaaaaaaaaaaaaaaaaagaaacttcagttaacagcctccttggtgctttaagcattcagcttccttcaggctggtaatttatataatccctgaaacgggcttcaggtcaaacccttaagacatctgaagctgcaacctggcctttggtgttgaaataggaaggtttaaggagaatctaagcattttagacttttttttataaatagacttattttcctttgtaatgtattggccttttagtgagtaaggctgggcagagggtgcttacaaccttgactccctttctccctggacttgatctgctgtttcagaggctaggttgtttctgtgggtgccttatcagggctgggatacttctgattctggcttccttcctgccccaccctcccgaccccagtccccctgatcctgctagaggcatgtctccttgcgtgtctaaaggtccctcatcctgtttgttttaggaatcctggtctcaggacctcatggaagaagagggggagagagttacaggttggacatgatgcacactatggggccccagcgacgtgtctggttgagctcagggaatatggttcttagccagtttcttggtgatatccagtggcacttgtaatggcgtcttcattcagttcatgcagggcaaaggcttactgataaacttgagtctgccctcgtatgagggtgtatacctggcctccctctgaggctggtgactcctccctgctggggccccacaggtgaggcagaacagctagagggcctccccgcctgcccgccttggctggctagctcgcctctcctgtgcgtatgggaacacctagcacgtgctggatgggctgcctctgactcagaggcatggccggatttggcaactcaaaaccaccttgcctcagctgatcagagtttctgtggaattctgtttgttaaatcaaattagctggtctctgaattaagggggagacgaccttctctaagatgaacagggttcgccccagtcctcctgcctggagacagttgatgtgtcatgcagagctcttacttctccagcaacactcttcagtacataataagcttaactgataaacagaatatttagaaaggtgagacttgggcttaccattgggtttaaatcatagggacctagggcgagggttcagggcttctctggagcagatattgtcaagttcatggccttaggtagcatgtatctggtcttaactctgattgtagcaaaagttctgagaggagctgagccctgttgtggcccattaaagaacagggtcctcaggccctgcccgcttcctgtccactgccccctccccatccccagcccagccgagggaatcccgtgggttgcttacctacctataaggtggtttataagctgctgtcctggccactgcattcaaattccaatgtgtacttcatagtgtaaaaatttatattattgtgaggttttttgtcttttttttttttttttttttttggtatattgctgtatctactttaacttccagaaataaacgttatataggaaccgt

SEQ ID NO: 42 - protein, 770 aa, Artificial Sequence
  STAT3 Amino Acid Sequence
MAQWNQLQQLDTRYLEQLHQLYSDSFPMELRQFLAPWIESQDWAYAASKESHATLVFHNLLGEIDQQYSRFLQESNVLYQHNLRRIKQFLQSRYLEKPMEIARIVARCLWEESRLLQTAATAAQQGGQANHPTAAVVTEKQQMLEQHLQDVRKRVQDLEQKMKVVENLQDDFDFNYKTLKSQGDMQDLNGNNQSVTRQKMQQLEQMLTALDQMRRSIVSELAGLLSAMEYVQKTLTDEELADWKRRQQIACIGGPPNICLDRLENWITSLAESQLQTRQQIKKLEELQQKVSYKGDPIVQHRPMLEERIVELFRNLMKSAFVVERQPCMPMHPDRPLVIKTGVQFTTKVRLLVKFPELNYQLKIKVCIDKDSGDVAALRGSRKFNILGTNTKVMNMEESNNGSLSAEFKHLTLREQRCGNGGRANCDASLIVTEELHLITFETEVYHQGLKIDLETHSLPVVVISNICQMPNAWASILWYNMLTNNPKNVNFFTKPPIGTWDQVAEVLSWQFSSTTKRGLSIEQLTTLAEKLLGPGVNYSGCQITWAKFCKENMAGKGFSFWVWLDNIIDLVKKYILALWNEGYIMGFISKERERAILSTKPPGTFLLRFSESSKEGGVTFTWVEKDISGKTQIQSVEPYTKQQLNNMSFAEIIMGYKIMDATNILVSPLVYLYPDIPKEEAFGKYCRPESQEHPEADPGSAAPYLKTKFICVTPTTCSNTIDLPMSPRTLDSLMQFGNNGEGAEPSAGGQFESLTFDMELTSECATSPM

SEQ ID NO: 43 - DNA, 4953 bp, Artificial Sequence
  Synthetic
ggtttccggagctgcggcggcgcagactgggagggggagccgggggttccgacgtcgcagccgagggaacaagccccaaccggatcctggacaggcaccccggcttggcgctgtctctccccctcggctcggagaggcccttcggcctgagggagcctcgccgcccgtccccggcacacgcgcagccccggcctctcggcctctgccggagaaacaggatggcccaatggaatcagctacagcagcttgacacacggtacctggagcagctccatcagctctacagtgacagcttcccaatggagctgcggcagtttctggccccttggattgagagtcaagattgggcatatgcggccagcaaagaatcacatgccactttggtgtttcataatctcctgggagagattgaccagcagtatagccgcttcctgcaagagtcgaatgttctctatcagcacaatctacgaagaatcaagcagtttcttcagagcaggtatcttgagaagccaatggagattgcccggattgtggcccggtgcctgtgggaagaatcacgccttctacagactgcagccactgcggcccagcaagggggccaggccaaccaccccacagcagccgtggtgacggagaagcagcagatgctggagcagcaccttcaggatgtccggaagagagtgcaggatctagaacagaaaatgaaagtggtagagaatctccaggatgactttgatttcaactataaaaccctcaagagtcaaggagacatgcaagatctgaatggaaacaaccagtcagtgaccaggcagaagatgcagcagctggaacagatgctcactgcgctggaccagatgcggagaagcatcgtgagtgagctggcggggcttttgtcagcgatggagtacgtgcagaaaactctcacggacgaggagctggctgactggaagaggcggcaacagattgcctgcattggaggcccgcccaacatctgcctagatcggctagaaaactggataacgtcattagcagaatctcaacttcagacccgtcaacaaattaagaaactggaggagttgcagcaaaaagtttcctacaaaggggaccccattgtacagcaccggccgatgctggaggagagaatcgtggagctgtttagaaacttaatgaaaagtgcctttgtggtggagcggcagccctgcatgcccatgcatcctgaccggcccctcgtcatcaagaccggcgtccagttcactactaaagtcaggttgctggtcaaattccctgagttgaattatcagcttaaaattaaagtgtgcattgacaaagactctggggacgttgcagctctcagaggatcccggaaatttaacattctgggcacaaacacaaaagtgatgaacatggaagaatccaacaacggcagcctctctgcagaattcaaacacttgaccctgagggagcagagatgtgggaatgggggccgagccaattgtgatgcttccctgattgtgactgaggagctgcacctgatcacctttgagaccgaggtgtatcaccaaggcctcaagattgacctagagacccactccttgccagttgtggtgatctccaacatctgtcagatgccaaatgcctgggcgtccatcctgtggtacaacatgctgaccaacaatcccaagaatgtaaacttttttaccaagcccccaattggaacctgggatcaagtggccgaggtcctgagctggcagttctcctccaccaccaagcgaggactgagcatcgagcagctgactacactggcagagaaactcttgggacctggtgtgaattattcagggtgtcagatcacatgggctaaattttgcaaagaaaacatggctggcaagggcttctccttctgggtctggctggacaatatcattgaccttgtgaaaaagtacatcctggccctttggaacgaagggtacatcatgggctttatcagtaaggagcgggagcgggccatcttgagcactaagcctccaggcaccttcctgctaagattcagtgaaagcagcaaagaaggaggcgtcactttcacttgggtggagaaggacatcagcggtaagacccagatccagtccgtggaaccatacacaaagcagcagctgaacaacatgtcatttgctgaaatcatcatgggctataagatcatggatgctaccaatatcctggtgtctccactggtctatctctatcctgacattcccaaggaggaggcattcggaaagtattgtcggccagagagccaggagcatcctgaagctgacccaggcgctgccccatacctgaagaccaagtttatctgtgtgacaccaacgacctgcagcaataccattgacctgccgatgtccccccgcactttagattcattgatgcagtttggaaataatggtgaaggtgctgaaccctcagcaggagggcagtttgagtccctcacctttgacatggagttgacctcggagtgcgctacctcccccatgtgaggagctgagaacggaagctgcagaaagatacgactgaggcgcctacctgcattctgccacccctcacacagccaaaccccagatcatctgaaactactaactttgtggttccagattttttttaatctcctacttctgctatctttgagcaatctgggcacttttaaaaatagagaaatgagtgaatgtgggtgatctgcttttatctaaatgcaaataaggatgtgttctctgagacccatgatcaggggatgtggcggggggtggctagagggagaaaaaggaaatgtcttgtgttgttttgttcccctgccctcctttctcagcagctttttgttattgttgttgttgttcttagacaagtgcctcctggtgcctgcggcatccttctgcctgtttctgtaagcaaatgccacaggccacctatagctacatactcctggcattgcactttttaaccttgctgacatccaaatagaagataggactatctaagccctaggtttctttttaaattaagaaataataacaattaaagggcaaaaaacactgtatcagcatagcctttctgtatttaagaaacttaagcagccgggcatggtggctcacgcctgtaatcccagcactttgggaggccgaggcggatcataaggtcaggagatcaagaccatcctggctaacacggtgaaaccccgtctctactaaaagtacaaaaaattagctgggtgtggtggtgggcgcctgtagtcccagctactcgggaggctgaggcaggagaatcgcttgaacctgagaggcggaggttgcagtgagccaaaattgcaccactgcacactgcactccatcctgggcgacagtctgagactctgtctcaaaaaaaaaaaaaaaaaaaagaaacttcagttaacagcctccttggtgctttaagcattcagcttccttcaggctggtaatttatataatccctgaaacgggcttcaggtcaaacccttaagacatctgaagctgcaacctggcctttggtgttgaaataggaaggtttaaggagaatctaagcattttagacttttttttataaatagacttattttcctttgtaatgtattggccttttagtgagtaaggctgggcagagggtgcttacaaccttgactccctttctccctggacttgatctgctgtttcagaggctaggttgtttctgtgggtgccttatcagggctgggatacttctgattctggcttccttcctgccccaccctcccgaccccagtccccctgatcctgctagaggcatgtctccttgcgtgtctaaaggtccctcatcctgtttgttttaggaatcctggtctcaggacctcatggaagaagagggggagagagttacaggttggacatgatgcacactatggggccccagcgacgtgtctggttgagctcagggaatatggttcttagccagtttcttggtgatatccagtggcacttgtaatggcgtcttcattcagttcatgcagggcaaaggcttactgataaacttgagtctgccctcgtatgagggtgtatacctggcctccctctgaggctggtgactcctccctgctggggccccacaggtgaggcagaacagctagagggcctccccgcctgcccgccttggctggctagctcgcctctcctgtgcgtatgggaacacctagcacgtgctggatgggctgcctctgactcagaggcatggccggatttggcaactcaaaaccaccttgcctcagctgatcagagtttctgtggaattctgtttgttaaatcaaattagctggtctctgaattaagggggagacgaccttctctaagatgaacagggttcgccccagtcctcctgcctggagacagttgatgtgtcatgcagagctcttacttctccagcaacactcttcagtacataataagcttaactgataaacagaatatttagaaaggtgagacttgggcttaccattgggtttaaatcatagggacctagggcgagggttcagggcttctctggagcagatattgtcaagttcatggccttaggtagcatgtatctggtcttaactctgattgtagcaaaagttctgagaggagctgagccctgttgtggcccattaaagaacagggtcctcaggccctgcccgcttcctgtccactgccccctccccatccccagcccagccgagggaatcccgtgggttgcttacctacctataaggtggtttataagctgctgtcctggccactgcattcaaattccaatgtgtacttcatagtgtaaaaatttatattattgtgaggttttttgtcttttttttttttttttttttttggtatattgctgtatctactttaacttccagaaataaacgttatataggaaccgtaaaaa

SEQ ID NO: 44-50 - skipped (7 entries)

SEQ ID NO: 51 - DNA, 19438 bp, Artificial Sequence
  NRas Genomic Sequence
aaaaaaaaaagtcaggtgtggtggctcacacctgtaaacccaacacttcgggaggccaaggtgggcagatcacttgagcccaggagtttgagaccagcctgggcaacatggcaaaaccctgtctctacaaaaaatgcaaaaattagccagtcatggtgtgtgcctgtagtcccagcgactcaggagctgaggtgggaggatcacccgagcccaggaaatcaaggctgcagtgagccgttgatcgccactgcactccagcctgggtagcagagcgagaccctgtctcaacaataacaatgacaaaaattcttcacttaccctgtaatcatcaagaggatggttagaagcttctgcttcccacctgtttttctcatgttttccactattgttgactgagtacatttgcctggatgctgaaaattgttaggcagctgaattctttggcatagtttttatctgtagcctgcaccgggctccaggcaacttcatactgtagggcagggctcagcatatatggtggccttttcttgtgatcacagccacaaccatttgtttacatattgtttttcgttgctttctcactacaacagcagagttggttagacaggatgacttgcaaacctaaaataatactctccggccctttaggaaaatggtttttggtctctgatctggaaaaaggaacctatgtgagggagccagaattcgaacaaaaaaaaaggaggtggggtgtcaaatttatctaaattgtttttgcctgtgcccgcctagttgtttactggctcattgagtatgggacaaaagtatttttggttggctcatattgtgaacttgggaagaagatagtcctgtgaatattggcaacccatagtgcttaaaatttaggcaatgggattgtaaatgacagtattttttgttttaatttataaatgcagtttaaaattgttcatcagctaataaagtactgatgggagctgtgacattctcatttggttccatggtagtatttaacatttaggatttcatttaagctttaaggtgaaacttctgagtactgaaaatgtaaatatattttaagtaacataacacatttttagcagttatataaacttcctagggtcatcagcagaggactgttgtgaaatactagcttttagactttgtacctgttttacaggcgatatgaaaggtgaggtctatccatttggcatcgttgggatggccaacaaaggggattgcctgcagaaaggggagagcgtcaagttccaattgtgtgtcctgggccaaaatgcacaaactatggcttacaacatcacacccctgcgcagggccacagtggaatgtgtgaaagatcaggtaagtgccagcatctctgtatctgaatttgatccttctatgagttggtaaccaaaaccttcaaatattttcagccaaggggaaatcatcaacattcattcgtttttttatttctacttcaccttttttcagtcatttgaggtagcttaataaaaacagaaaactacacaaaaagtgactatattagcaatgagaaagtaagattggtattagtaactaatattatgcaatggggaaaataagttaggggtgagatttccagaatagaaggactatatggttttgtacacttttgcttagagcttcttttgcatatcacacaaacacagaaaccacgttcaaaagtacttaaaaaataagcttagggcaaacaaacttagtcttactcctgagatctcagggaaatctgagtcctcagaatgtttttcatcagtacagagaataataacattttgtatggctgctactataacccagcttaattctagaggggatccaaacaatatatatgttgaagtaacagcttcctgatgagtttgcttaattcaaaaagcttagttcataatatacgaaggaacaaggcaagttttatttgtttggttcaagtttgtgatatagtgaatggcactttcagagatacatttcttccctgacaggttttgccacaggcagctggactggagtatcaacattaataccatgttttatacatccttttagataggggcaggcattgtgcttcattcagagtgaggtgtggcatgccctctcttttttacctacttttttttttcagtttggcttcattaactatgaagtaggagatagcaagaagctctttttccatgtgaaagaagttcaggatggcattgagctacaggcaggagatgaggtggagttctcagtgattcttaatcagcgcactggcaagtgcagcgcctgtaatgtttggcgagtctggtgagttttgttgttgtggtttgattagtaactaccctggagtgtctcaactttatagtctctgttttgtcacatcacttttctgtgccttgtcttctgccacttattatttcttgatacttcctacttctagttgaatacaaaaagattgtttagtacatgttttttaaaatttttgccaaattcttcttcttccattaagtcatttctaggttatatgctacttaaaattctaatagtttagccatgctgattcataatgccgctttgcttccccagagacagtctcacagtctgattcggttacccaggcgctatcacgactcactgcagactcaaccccctgggcctaagcaattctcccacgtcagcttccccagtagctgggactacaagcatgcgccaccacatgcagccaattttattttttgtagagacatggtcccactgttttgcccaggctgatctcgaacttctgggctcaagtgttcctcctgccctgtcctctcaaagcgctgggattacaggtgttagctaccacatctgctaccttgtttttttatgcatctgtggaactggtcactcttgattgcattcaagtctagggtctgcaaatgattccttccattcctattaagttgggaccttgagttggggataataatacataaacaaacttgtctgtcctgtctttctagctaggtatatgaggcaagagtcccatcataaaaagtgagtcatttgggcagttaggtggaaaacacactcctttgcaagtgcttgctgtctgcccaccaagtgtggtttcttctcatcttttgacttaattacagtgagggccccaaggctgttgcagctcctcgacctgatcggttggtcaatcgcttgaagaatatcactctggatgatgccagtgctcctcgcctaatggttcttcgtcagccaaggggaccagataactcaatggtatgagggcatacaaggcttgggggaggccaactgatagaccaacataaaatatgtggtcctatttaaacaataggtcaggaaacttaatgaagcagggagacttccatattgcttataactagttaggactttctacacattggttcagccccctaacctaatggttgcttacagtaagaagcacatttcttttcttgatgctttgaagacagtttaggtaatgaatgggtcaggagtgcttactgtggattttctcctctaggaaagaattagtactgcataagatgattaaaaataatgcttttgtagtttcatttcggaatagtgaatgtactatgattgttgtgcgctcaaatcattaactgcagggttttttttttctcccccccacaggggtttggtgcagaaagaaagatccgtcaagctggtgtcattgactaaccacatccacaaagcacaccattaatccactatgatcaagttggggggaatctggtgaagggttctgaatatctccctcttcatccctcccgaaatctggaatacttattctattgagctattacaccagttttaacaccttcctcgtgttatgtttaaaaaaataaataaatttaagaaaaccattttaaataatgcacagttgcagcctggaaaaacttaaggtggcgccttatagtatcaattttaggagctttatttggtgcatttaacgcaactggtaattgcagaatccactttgcctgtgtaagtgaaaaatatagactgttatcttgttggccctatgaaattctgcacttttcattatatactctaccttcattaattacttctggcaagatgttctgccttagcactcagttgcattcttttcctttttcttcctgttcattatgctttaattctgaggaccatatgagggtagaatatattatcttttaaaaattacaaaaatttgtataggcaaaccatttcttaaagttgatggccaaattttaaaatgttatttttcatatcatttataatcttgtcacaatccacttaaagaagtttggttatatttcagtgaaaattttcttccagagtaggttttttttcgtgggttggggggtaactttactacaattagtaagtatggtgcagaatttcatgcaaatgaggagtgccagcagtgtgataatttaaacatatttaaacaaaaacaaaaaaaatgaatgcacaaacttgctgctgcttagatcactgcagcttctaggacccggtttcttttactgatttaaaaacaaaacaaaaaaaaataaaaaagttgtgcctgaaatgaatcttgtttttttttataagtagccgcctggttactgtgtcctgtaaaatacagacacttgacccttggtgtagcttctgttcaactttatatcacgggaatggatgggtctgatttcttggccctcttcttgaattggccatatacagggtccctggccagtggactgaaggctttgtctaagatgacaagggtcagctcaggggatgtgggggagggcggttttatcttcccccttgtcgtttgaggttttgatctctgggtaaagaggccgtttatctttgtaaacacgaaacatttttgctttctccagttttctgttaatggcgaaagaatggaagcgaataaagttttactgatttttgagacactagcacctagcgctttcattattgaaacgtcccgtgtgggaggggcgggtctgggtgcggcctgccgcatgactcgtggttcggaggcccacgtggccggggcggggactcaggcgcctggggcgccgactgattacgtagcgggcggggccggaagtgccgctccttggtgggggctgttcatggcggttccggggtctccaacatttttcccggctgtggtcctaaatctgtccaaagcagaggcagtggagcttgaggtaagtttatctcatgcatagtgttcggctttgggctgtggaatgttcaggcgtttcactgatgccagaaatggagcagaatctatcagctggagacaaaggccttgggcgggggtccttccatttggtgcctacgtggggagatctttggagacagaagggagaatgggaaggagttgcggcctggaggcttcctgctagagctgagaagccttcggggagtaataggaagggggatttccattgcttaggctgagggcggggcccaaggactgttgaaaaatagctaaggatgggggttgctagaaaactactccagaagtgtgaggccgatattaatccggtgtttttgcgttctctagtcactttaagaaccaaatggaaggtcacactagggttttcatttccattgattatagaaagctttaaagtactgtagatgtggctcgccaattaaccctgattactggtttccaacaggttcttgctggtgtgaaatgactgagtacaaactggtggtggttggagcaggtggtgttgggaaaagcgcactgacaatccagctaatccagaaccactttgtagatgaatatgatcccaccatagaggtgaggcccagtggtagcccgctgacctgatcctgtctctcacttgtcggatcatctttacccatattctgtattaaaggaataagaggagagaaagtaaaaagttattttgggtatacattcagttatgcaataagcttaacgtgtttatagagaacagttcatttttattagctgctgaagtttctaaaacctgtccagtttttaacagttctgtaaactattgcaaactcagtgttgagttcattcatgagtttcttcatatataacagctctattacatgagaaacacaggccatagtagcgagactgtctgattgtatgggagataataggatggagataaaggattcagagatgagtgttcttcaatatttatttattagctagttgaagcagctgagaccagatgattggagtagcaagaacttgagatttttagtctttatgcctaggattttggtccctgtttgcagtttatttagttgtgtgatattgagcaactgaatctctcccaacctcattttcctcatgttttaaattaccataaacttgtcctgcctaccacacagggatgttatggaaagttaaataatatatttaagttatttatgaatggtaaagcactatgtaatagtacttagggattctattgttattatgagagttcatggtacagattgtcttcagtaagtggcacctaaggctctttaaataaagggttttgccggacacggtggctcacgcctgtaatcccagcactttgggaggctgaggcaggcggatcacaaggtcaggagttcaagaccagcctgatcaacatggtgaaaccccgtctctactaaaaatacaaaaattagctgggtgtggtggcaggcacctgtaatcccagctactcaggaggctgaggcaggagaatcgcttgaaccagaggcagagggtgcagtgagccgagatcacaccacagacctccagcctgggcaacagagcgagacttcgtctcaaaaaataaataaatagataaataaataaagggttttgtaattttgttcagtttagaaatgcctaactttagagattattttaatcaacacctggcctccctaccatctggctactcgtgtttaattgatgaaaactaactctaatgtagccactataaaaaattggttgctaacccttggcaaaatctttattttgagcttaacagctttaatattttacatgaaatgtttaatattttaattaaatatttttaaatgtttgatttattgagcaatttacataagtaaaatacataaattttatgtctacagcccagtgctttttgcgtttctatatagtcatgtagctaccacccagataacagtatagagcacttccagtactccagagagttctccaagtgtgatgacattaaaatacaagtaaaagtcctgttgccataaaaccaaaatgaaagtattttttatatgatctatgcatgtttgtcttcctgagaaattaaacataactataccttgtttggaacctttaagaatttgattcaggaatatttcccaaaggtacatctgtcatgataaaaaaaaaaccttctctgaaacaaaggtatttgtatatttagtcataaacacaaatgatgtatatagggccaggttataattggtggaggtatgtttagatttctttaagtaaaataaacagcacaaataaaacagtccagttcatagcttagtgaaatacactgggtacttaatctgtagcctcctggctgcagtagagttgtcatttgagttactgtgttttcttaatcttttccaggaacacagtgaccatatttcttttctgcaggcatatagaatttggtgggttttcttttatgtagggtgatattggatactttttgtttgtgattatatattagcaatttgagggacaaaccagataggcagaaatgggcttgaatagttagatgcttatttaaccttggcaatagcattgcattccctgtggtttttaataaaaattgaacttccctccctccctgcccccttaccctccacacccccaggattcttacagaaaacaagtggttatagatggtgaaacctgtttgttggacatactggatacagctggacaagaagagtacagtgccatgagagaccaatacatgaggacaggcgaaggcttcctctgtgtatttgccatcaataatagcaagtcatttgcggatattaacctctacaggtactaggagcattattttctctgaaaggatgatctttgtgttctgaatctttatggggaaatgaggttaccacactagggaagatagagctttttaattatgggaagagttggttttaggttgtttgacattgagaatctagggtaattactgaaagttaatactggaatttattttacataatatactgttactataaagtttgataatacataagtgaagcttgctactgggaatgacttggaaccagagttgttgtaattagagatcacgaaggaatttcagagaggaaaacatctccaagaaacatctttcagtatgtaatggaaaagataggccaggcacagtggctcacacctggaatgtcagtgctttgggaggccaaggcgggaggatcactttcagcccaggagttggagaccagcctgggcaacagagcaagaccctgtctctacaaaaataaaaataaaaaaattagtcacacatggtggcagctactcgggaggcagaggtgggaggatcacgtgagctcaggaggtcgaggcatgctcactccactgcactgctgcactccagcctaatcaacagagcaagattctgtctccaaaaaaaataaaaaataaaatgataggagtaagcaaataggaagtccataaagatgaaaacaaagcaagggaacataaagatagactttgtccatagaaccataaagtttcaaagctagattggaccataaaaattctagtacaatattcttattttgcagaatcagaaacagagttcagaatgtcgtttgttaggttttggagtcaggattgttattagtagcagagccaggaccaaaaacccaaagctcctttttcttagcacagtgttcttaaacagaataatataatggttaagaatgagaactctgcctggattgaaacctagctctgtttattagcgacgtgactcaggggctatgtggctttcctaacctataatatggaaataataatacctacctcatagagttgtgaagattacagttttaataaatacgcaaatcactcagaatagtgcctggcacacagtaaatgctacttaagtgttctgcctaaaggcttgagtcttggcttattttctatccatgtgaagatgtctgctctcaaaagcagattggtccaacactgaattcaagtgttcttttcctaacctgttgtacttcccattttttttttgtctaaaagtaatagcagtacttaataaaatgcccacacttggcatgcatctaataaatgttttttgaatttctagaagtcatttttcttctttcttacaagaaatttattcatttttctatatgccttagctcaaaccaaagagtatttaaaacatcttatgaaaatgcatatagtagagcaagataagattaatgaaaaataggcttaagtgagaccaaaaaaataagggtaaaataaacaaatttaggagtgagcatattctgtgattgtgcatgaagttccagtggctttctaaaggtggactacaaatttggtcactgttgtgaaaaggaaagtagccagctgaaagattcagtatctgtatgctgaaagccgttaagttgctcggactagaaggaaattttcccatggatcctcaaagaggcttgtttaatgtaaaaatcagtagtaacctgacagtgacatggtccaggtactttaggctgtcttatcccttaatgtaggctattaccatcaagcacagttttgcaaatagccagtggaatgtagttcagatacatgactttgtgggtaatccaggggtagagactaaaacagtactgtgcagtatgtggttatttacagttaattaagattaaataaaatttaaaaattagttccttgactaccaaatgctcaatagccactagtaggtaccatgttgaacagtacagatatagaccatttccatcatcacataaagtactgttggattgtgttggtcaagacaatctaaagcaattgtttcccaggtgtgctgtgtggtgtgccttacatgtcattgaaaggggtgctgtcaggagttctagatgcttcagcctccctttactaagagcagttcttatgttttctattttatcgcttgggcttccagatacaatgttttgttttaggtttgttttttttgtttgtttgtttttttttttttgagacggagttttgctctggttgcccaagctggatggagtacggtggtgcgatcgcggctcactgcaacctccgcctcccgggttcgagagattctcctgcctcagcttcccgagtagctggaattacaggcgtccaccaccatgcctgactaattttttttgtatttttagtagacttggggtttcaccatgttggccgggctggtttcaaactcctgacctcaggtgatccacccgcctcggcctcccagagggctgggattacaggtgtgaaccaccgtgcccggcctgttttagttttttagagatggagtctccctctgttgcccaagccagagtgcggtggcatgacactctcagggttcaacctctcagggatcaagggatcctcccacctcagcttcctgagtagctggaaccacaggcacatgtgccaccatgcccagctaatttttgtattttttgtagaagcaaggtttcaccatgttgcccaggctggtctcggactcctaggtcaagtgatcctcccacctcaatctcctagagtgctaagactataggcgggagtcaccatgcccagcttcatctacaatttatttgaagaaaatgtttgagcaccacccatcttgaaaagtgatagactgccttccattaaatactgtcacacctagttatttagcagcagtgagcttcactttttatactttagaccttaatctaaagggtgatttctagttgccagttaaatccagagccaagctctttggagaatccaggagcctcactaggtcatgtatcaggataaaatacccatccactcccattagaaggtgagcttgtacttatggcttcctgatggctgctgcaacaagtctaaagcagtctccttagtatacaatgtcttctctaagtggtagaaaaaagcaaaaatactacaagttaatagggctacataaaatttgctagtttcttttttgccctagccatttattccttcctgaaatcttgtctctctctcgctctctctttctctcgctctcactttctttctctttttcttttctcttttcttttctttcttccctttcttttctttcttttttcctgttgcccaggctggagtgcagtggaacaattatggctcactgcagccttgacctttctggacccaggtgatcctcccacctcagtctcccaattagctgggactacaggcatgcgccaccacacccagctataatatatattgtatatatattttttatttataaatatatataaatatatatttatatgtgtaaattatatatatttatatattataaattatatataaatatatatttatatataatatatataatatatatttatttttatatattttatatatattttttggggggggttgggggggatggagtctcactctgtcgcccaggctagagtgtagtggcgtgatcttggctcactgcaatcttcgcctcccaggttcaagcgattctcctgcctcagcttcccgagtagctgggactataggcgcctgccaccacacctggctaatttttgtatttttagtagagatggggtttcaccatattggccaggctggtcttcaactcctgaccttgtgatctgcccacctcaacctcccaaagtgctgggaatacaggcatgagccactgcacccagcctaatctttgtatttttttgtagagaccgggttttgccatgttgcccaggctaatctcaaactcctgggttcaagcagtctgccctcctcagcctcccaaagtgctgagattgcaggcatgagccactgtacccagcctaatcttgtttttcttatgttctgataatatattcccgtttttagggagcagattaagcgagtaaaagactcggatgatgtacctatggtgctagtgggaaacaagtgtgatttgccaacaaggacagttgatacaaaacaagcccacgaactggccaagagttacgggattccattcattgaaacctcagccaagaccagacaggtatggtacagctttcagcatttgtgcaagagtttgcatcagttgattaactctggtagagatgtgatccatattcatattctttgttgttatgcatttttttcatttttatttttttattttttatttttttttaggcagagtctcactctatcttctaagctggagtgcagtggtgtgatctcagctcactgcagcctctgtctcttgggttcaagtgattctcctgcctcagcctcccaagtagctgggactacgggcacatcatcatgcccggctaatttttgtacttttagtagagacagggttttaccatgttgcccaggctggtctcgaactcctggcctcaagcaatcctcccacctgggcctcccagagtgctgggattacaggtgtgagccaccacgcccagcctgttgttaggcatttttagtagtgttctttttcttaacgcttgtttaaacccaaaatgaacttactaatattctgttatggcatgtttactcctgcattaacatccacaaatatttcttgggaagatccttgactaaaaatatttataaacattagttatttctctgtcaacaccagcccgtttatggcttaagcctcctgaatggagtctttagtttaatgtagttttgttccgtgtttctcacattacccttttcctttgcatgaatgtttatttggcaaaatgtgccatttttatatcagcctgttcttgtgattcaataggaatgtgaaatttagtgttctcttccttaaatcaccatattttattttatcagctattcgtttagtaattggaatcttatgtccacataaagagatacaaatgcaagagagcttataatttggattgtgtccgttgagctagctctctcattttttttcattttttccttttatagggtgttgaagatgctttttacacactggtaagagaaatacgccagtaccgaatgaaaaaactcaacagcagtgatgatgggactcagggttgtatgggattgccatgtgtggtgatgtaacaaggtgagcatatggtttcttggcataattacaaatcttagtatatagtattgggcaatttggaggagtgctggtgttattgtctatatgttttttgagtttctgcctatcctcttctgcacattttccatatgacaccctttctgaaagtactgaggtctaaagtgtttaaaacatttgattattccacaggtatctttatatttttggtaacattagaaattataagacattatttatgaaatgtaggcataccctattcctggcaatgaccaggaatttgaaggatcactactttgaaactagttaataaggacatggtttctgttctttttttacagatacttttaaagttttgtcagaaaagagccactttcaaggtaggacaagtttggaaatgtattctcattcctgttaattttgtatatttgtttttcttatactctgaatgtgtcacttatacaaattctgtttctatttcagctgcactgacaccctggtcctgacttccctggaggagaagtattcctgttgctgtcttcagtctcacagagaagctcctgctacttccccagctctcagtagtttagtacaataatctctatttgagaagttctcagaataactacctcctcacttggctgtctgaccagagaatgcacctcttgttactccctgttatttttctgccctgggttcttccacagcacaaacacacctctgccaccccaggtttttcatctgaaaagcagttcatgtctgaaacagagaaccaaaccgcaaacgtgaaattctattgaaaacagtgtcttgagctctaaagtagcaactgctggtgattttttttttctttttactgttgaacttagaactatgctaatttttggagaaatgtcataaattactgttttgccaagaatatagttattattgctgtttggtttgtttataatgttatcggctctattctctaaactggcatctgctctagattcataaatacaaaaatgaatactgaattttgagtctatcctagtcttcacaactttgacgtaattaaatccaactttcacagtgaagtgcctttttcctagaagtggtttgtagacttcctttataatatttcagtggaatagatgtctcaaaaatccttatgcatgaaatgaatgtctgagatacgtctgtgacttatctaccattgaaggaaagctatatctatttgagagcagatgccattttgtacatgtatgaaattggttttccagaggcctgttttggggctttcccaggagaaagatgaaactgaaagcacatgaataatttcacttaataatttttacctaatctccacttttttcataggttactacctatacaatgtatgtaatttgtttcccctagcttactgataaacctaatattcaatgaacttccatttgtattcaaatttgtgtcataccagaaagctctacatttgcagatgttcaaatattgtaaaactttggtgcattgttatttaatagctgtgatcagtgattttcaaacctcaaatatagtatattaacaaattacattttcactgtatatcatggtatcttaatgatgtatataattgccttcaatccccttctcaccccaccctctacagcttcccccacagcaataggggcttgattatttcagttgagtaaagcatggtgctaatggaccagggtcacagtttcaaaacttgaacaatccagttagcatcacagagaaagaaattcttctgcatttgctcattgcaccagtaactccagctagtaattttgctaggtagctgcagttagccctgcaaggaaagaagaggtcagttagcacaaaccctttaccatgactggaaaactcagtatcacgtatttaaacatttttttttcttttagccatgtagaaactctaaattaagccaatattctcatttgagaatgaggatgtctcagctgagaaacgttttaaattctctttattcataatgttctttgaagggtttaaaacaagatgttgataaatctaagctgatgagtttgctcaaaacaggaagttgaaattgttgagacaggaatggaaaatataattaattgatacctatgaggatttggaggcttggcattttaatttgcagataataccctggtaattctcatgaaaaatagacttggataacttttgataaaagactaattccaaaatggccactttgttcctgtctttaatatctaaatacttactgaggtcctccatcttctatattatgaattttcatttattaagcaaatgtcatattaccttgaaattcagaagagaagaaacatatactgtgtccagagtataatgaacctgcagagttgtgcttcttactgctaattctgggagctttcacagtactgtcatcatttgtaaatggaaattctgcttttctgtttctgctccttctggagcagtgctactctgtaattttcctgaggcttatcacctcagtcatttcttttttaaatgtctgtgactggcagtgattctttttcttaaaaatctattaaatttgatgtcaaattagggagaaagatagttactcatcttgggctcttgtgccaatagcccttgtatgtatgtacttagagttttccaagtatgttctaagcacagaagtttctaaatggggccaaaattcagacttgagtatgttctttgaataccttaagaagttacaattagccgggcatggtggcccgtgcctgtagtcccagctacttgagaggctgaggcaggagaatcacttcaacccaggaggtggaggttacagtgagcagagatcgtgccactgcactccagcctgggtgacaagagagacttgtctccaaaaaaaaagttacacctaggtgtgaattttggcacaaaggagtgacaaacttatagttaaaagctgaataacttcagtgtggtataaaacgtggtttttaggctatgtttgtgattgctgaaaagaattctagtttacctcaaaatccttctctttccccaaattaagtgcctggccagctgtcataaattacatattccttttggtttttttaaaggttacatgttcaagagtgaaaataagatgttctgtctgaaggctaccatgccggatctgtaaatgaacctgttaaatgctgtatttgctccaacggcttactatagaatgttacttaatacaatatcatacttattacaatttttactataggagtgtaataggtaaaattaatctctattttagtgggcccatgtttagtctttcaccatcctttaaactgctgtgaatttttttgtcatgacttgaaagcaaggatagagaaacactttagagatatgtggggtttttttaccattccagagcttgtgagcataatcatatttgctttatatttatagtcatgaactcctaagttggcagctacaaccaagaaccaaaaaatggtgcgttctgcttcttgtaattcatctctgctaataaattataagaagcaaggaaaattagggaaaatattttatttggatggtttctataaacaagggactataattcttgtacattatttttcatctttgctgtttctttgagcagtctaatgtgccacacaattatctaaggtatttgttttctataagaattgttttaaaagtattcttgttaccagagtagttgtattatatttcaaaacgtaagatgatttttaaaagcctgagtactgacctaagatggaattgtatgaactctgctctggagggaggggaggatgtccgtggaagttgtaagacttttatttttttgtgccatcaaatataggtaaaaataattgtgcaattctgctgtttaaacaggaactattggcctccttggccctaaatggaagggccgatattttaagttgattattttattgtaaattaatccaacctagttctttttaatttggttgaatgttttttcttgttaaatgatgtttaaaaaataaaaactggaagttcttggcttagtcataattcttatattcactgaagtgcctttatagaatgctaatattaatttcaaacttttggatgtgacatttggaagtgttggaatatctgagttcctcatttcatcataacatcaaatatatcaaagcctgctttaaagtattaccttggggatgattcatagctatttgtcagatttgcatacattaagatgccattggagctcttttgtctcgtttttgcattactgcacaatctagccatcttggtataggtggaggagcattgatgctaggggctggagaacttgaggcccgatataattttactacgccggcccagtttcttcaattgcaaaatagaagagttgaattaggatatatcagatttcccaaccttaaggagactttaaaaagaataatatcaaacctaggcattttcaactaacactggaatactaattttggagaccttggtttactctaccaaagacatcaaaattttttttcacttttttttcttgaaaaggaggcagggaaggtaggtcattaacatgtggctgaagtaagcttgggaaaaccaattttaaatgacaatattttttctagctaggacaactagaaagagtaaatattttaattataaaatgtatttgaaaaagaaatagaattagggaatttgtatctttcaaactatcacctcatatagagacctaggtgatagtttgagagagaaacatacaaagtccacagttctatttctttttcatatacattttacaaaaatttgttctaatgtttgaccctctaataacggaaaagaggaaaggatgttttctggtgagaactgctgttctgttcagcaaaataaagctacagaaacaaataatgagaaggtacctaaagaagcttgtttatttggaatatgagggaaccacctgtgcatctctgtgctattaaggtttctgttctcataagcaatatttaaggtcactgaaaggccaacatagttgcatgagttatttgatacccataaatacatgagaagaggccaagaggccttgctagtgatcatttcgcaaaactgtctgaggatgtccagctccatgagagcacagagagaatcactgtccagtttccaagtgggaagggtatgctttgtaatgcttttaaaagtaactgggcagtgaaatgtgaccctttaccttaataaaagacagctggaacttcaggaacatacaaaatagaaatattctttccagttgcaaaaggaacataagagggttcagattcatgaaccaagagttgagttgaccattcttatttgcagttgaattctaccatatgatttacttcacacttgcaccgaaatagtctattataaactactggtgttgggggtggggcgggagtgggaatggggaatgaaggggaggaatgaacttagtttcttaactagtataaattcagattaccatcaacttgtagaagccatatgaagtaaaaatgggtagcacctgcaacactgggacttagcgtgctattaaatgtttctaaagatagaggcacgtagctacatgtctcataggggaggatgtggttgtagctagcagttgcctactagcaggcttctttatttgcagcagcctgaaatacccaggttaggaaaagcaatcttccagaatggatgctgtggacatggtacaattggcgctattgatactttctgtaggagcttgaaatgtgtggattgtagttaagtctgaaagaaaacttgcacttgattttaaaacattttcttataaatcaattcacatttataactgagacccaacattcctgataggaatatttttgtaaatcaatggtatgaagtgtaaagacatgttgaaagttagaagaagagatcttttaagtgtatgcttgttttggctgtgaagctgaggggtttgacatttactattaaagttcaaaataaaactagcatggcatatgaagtagaattaccaaggcctgtgtttctctaagagaaccata

SEQ ID NO: 52 - protein, 189 aa, Artificial Sequence
  NRas Amino Acid Sequence
MTEYKLVVVGAGGVGKSALTIQLIQNHFVDEYDPTIEDSYRKQVVIDGETCLLDILDTAGQEEYSAMRDQYMRTGEGFLCVFAINNSKSFADINLYREQIKRVKDSDDVPMVLVGNKCDLPTRTVDTKQAHELAKSYGIPFIETSAKTRQGVEDAFYTLVREIRQYRMKKLNSSDDGTQGCMGLPCVVM

SEQ ID NO: 53 - DNA, 4326 bp, Artificial Sequence
  Synthetic
ggggccggaagtgccgctccttggtgggggctgttcatggcggttccggggtctccaacatttttcccggctgtggtcctaaatctgtccaaagcagaggcagtggagcttgaggttcttgctggtgtgaaatgactgagtacaaactggtggtggttggagcaggtggtgttgggaaaagcgcactgacaatccagctaatccagaaccactttgtagatgaatatgatcccaccatagaggattcttacagaaaacaagtggttatagatggtgaaacctgtttgttggacatactggatacagctggacaagaagagtacagtgccatgagagaccaatacatgaggacaggcgaaggcttcctctgtgtatttgccatcaataatagcaagtcatttgcggatattaacctctacagggagcagattaagcgagtaaaagactcggatgatgtacctatggtgctagtgggaaacaagtgtgatttgccaacaaggacagttgatacaaaacaagcccacgaactggccaagagttacgggattccattcattgaaacctcagccaagaccagacagggtgttgaagatgctttttacacactggtaagagaaatacgccagtaccgaatgaaaaaactcaacagcagtgatgatgggactcagggttgtatgggattgccatgtgtggtgatgtaacaagatacttttaaagttttgtcagaaaagagccactttcaagctgcactgacaccctggtcctgacttccctggaggagaagtattcctgttgctgtcttcagtctcacagagaagctcctgctacttccccagctctcagtagtttagtacaataatctctatttgagaagttctcagaataactacctcctcacttggctgtctgaccagagaatgcacctcttgttactccctgttatttttctgccctgggttcttccacagcacaaacacacctctgccaccccaggtttttcatctgaaaagcagttcatgtctgaaacagagaaccaaaccgcaaacgtgaaattctattgaaaacagtgtcttgagctctaaagtagcaactgctggtgattttttttttctttttactgttgaacttagaactatgctaatttttggagaaatgtcataaattactgttttgccaagaatatagttattattgctgtttggtttgtttataatgttatcggctctattctctaaactggcatctgctctagattcataaatacaaaaatgaatactgaattttgagtctatcctagtcttcacaactttgacgtaattaaatccaactttcacagtgaagtgcctttttcctagaagtggtttgtagacttcctttataatatttcagtggaatagatgtctcaaaaatccttatgcatgaaatgaatgtctgagatacgtctgtgacttatctaccattgaaggaaagctatatctatttgagagcagatgccattttgtacatgtatgaaattggttttccagaggcctgttttggggctttcccaggagaaagatgaaactgaaagcacatgaataatttcacttaataatttttacctaatctccacttttttcataggttactacctatacaatgtatgtaatttgtttcccctagcttactgataaacctaatattcaatgaacttccatttgtattcaaatttgtgtcataccagaaagctctacatttgcagatgttcaaatattgtaaaactttggtgcattgttatttaatagctgtgatcagtgattttcaaacctcaaatatagtatattaacaaattacattttcactgtatatcatggtatcttaatgatgtatataattgccttcaatccccttctcaccccaccctctacagcttcccccacagcaataggggcttgattatttcagttgagtaaagcatggtgctaatggaccagggtcacagtttcaaaacttgaacaatccagttagcatcacagagaaagaaattcttctgcatttgctcattgcaccagtaactccagctagtaattttgctaggtagctgcagttagccctgcaaggaaagaagaggtcagttagcacaaaccctttaccatgactggaaaactcagtatcacgtatttaaacatttttttttcttttagccatgtagaaactctaaattaagccaatattctcatttgagaatgaggatgtctcagctgagaaacgttttaaattctctttattcataatgttctttgaagggtttaaaacaagatgttgataaatctaagctgatgagtttgctcaaaacaggaagttgaaattgttgagacaggaatggaaaatataattaattgatacctatgaggatttggaggcttggcattttaatttgcagataataccctggtaattctcatgaaaaatagacttggataacttttgataaaagactaattccaaaatggccactttgttcctgtctttaatatctaaatacttactgaggtcctccatcttctatattatgaattttcatttattaagcaaatgtcatattaccttgaaattcagaagagaagaaacatatactgtgtccagagtataatgaacctgcagagttgtgcttcttactgctaattctgggagctttcacagtactgtcatcatttgtaaatggaaattctgcttttctgtttctgctccttctggagcagtgctactctgtaattttcctgaggcttatcacctcagtcatttcttttttaaatgtctgtgactggcagtgattctttttcttaaaaatctattaaatttgatgtcaaattagggagaaagatagttactcatcttgggctcttgtgccaatagcccttgtatgtatgtacttagagttttccaagtatgttctaagcacagaagtttctaaatggggccaaaattcagacttgagtatgttctttgaataccttaagaagttacaattagccgggcatggtggcccgtgcctgtagtcccagctacttgagaggctgaggcaggagaatcacttcaacccaggaggtggaggttacagtgagcagagatcgtgccactgcactccagcctgggtgacaagagagacttgtctccaaaaaaaaagttacacctaggtgtgaattttggcacaaaggagtgacaaacttatagttaaaagctgaataacttcagtgtggtataaaacgtggtttttaggctatgtttgtgattgctgaaaagaattctagtttacctcaaaatccttctctttccccaaattaagtgcctggccagctgtcataaattacatattccttttggtttttttaaaggttacatgttcaagagtgaaaataagatgttctgtctgaaggctaccatgccggatctgtaaatgaacctgttaaatgctgtatttgctccaacggcttactatagaatgttacttaatacaatatcatacttattacaatttttactataggagtgtaataggtaaaattaatctctattttagtgggcccatgtttagtctttcaccatcctttaaactgctgtgaatttttttgtcatgacttgaaagcaaggatagagaaacactttagagatatgtggggtttttttaccattccagagcttgtgagcataatcatatttgctttatatttatagtcatgaactcctaagttggcagctacaaccaagaaccaaaaaatggtgcgttctgcttcttgtaattcatctctgctaataaattataagaagcaaggaaaattagggaaaatattttatttggatggtttctataaacaagggactataattcttgtacattatttttcatctttgctgtttctttgagcagtctaatgtgccacacaattatctaaggtatttgttttctataagaattgttttaaaagtattcttgttaccagagtagttgtattatatttcaaaacgtaagatgatttttaaaagcctgagtactgacctaagatggaattgtatgaactctgctctggagggaggggaggatgtccgtggaagttgtaagacttttatttttttgtgccatcaaatataggtaaaaataattgtgcaattctgctgtttaaacaggaactattggcctccttggccctaaatggaagggccgatattttaagttgattattttattgtaaattaatccaacctagttctttttaatttggttgaatgttttttcttgttaaatgatgtttaaaaaataaaaactggaagttcttggcttagtcataa

SEQ ID NO: 54 - RNA, 22 nt, Artificial Sequence
  miR146a-5p
ugagaacugaauuccauggguu

SEQ ID NO: 55 - RNA, 22 nt, Artificial Sequence
  miR146a-3p
ccucugaaauucaguucuucag

SEQ ID NO: 56 - RNA, 23 nt, Artificial Sequence
  miR155-5p
uuaaugcuaaucgugauaggggu

SEQ ID NO: 57 - RNA, 22 nt, Artificial Sequence
  miR155-3p
cuccuacauauuagcauuaaca

SEQ ID NO: 58 - DNA, 1828 bp, Artificial Sequence
  Pmp22 mRNA
agttacagggagcaccaccagggaacatctcggggagcctggttggaagctgcaggcttagtctgtcggctgcgggtctctgactgccctgtggggagggtcttgccttaacatcccttgcatttggctgcaaagaaatctgcttggaagaaggggttacgctgtttggccgggcagaaactccgctgagcagaacttgccgccagaatgctcctcctgttgctgagtatcatcgtcctccacgtcgcggtgctggtgctgctgttcgtctccacgatcgtcagccaatggatcgtgggcaatggacacgcaactgatctctggcagaactgtagcacctcttcctcaggaaatgtccaccactgtttctcatcatcaccaaacgaatggctgcagtctgtccaggccaccatgatcctgtcgatcatcttcagcattctgtctctgttcctgttcttctgccaactcttcaccctcaccaaggggggcaggttttacatcactggaatcttccaaattcttgctggtctgtgcgtgatgagtgctgcggccatctacacggtgaggcacccggagtggcatctcaactcggattactcctacggtttcgcctacatcctggcctgggtggccttccccctggcccttctcagcggtgtcatctatgtgatcttgcggaaacgcgaatgaggcgcccagacggtctgtctgaggctctgagcgtacatagggaagggaggaagggaaaacagaaagcagacaaagaaaaaagagctagcccaaaatcccaaactcaaaccaaaccaaacagaaagcagtggaggtgggggttgctgttgattgaagatgtatataatatctccggtttataaaacctatttataacactttttacatatatgtacatagtattgtttgctttttatgttgaccatcagcctcgtgttgagccttaaagaagtagctaaggaactttacatcctaacagtataatccagctcagtatttttgttttgttttttgtttgtttgttttgttttacccagaaataagataactccatctcgccccttccctttcatctgaaagaagatacctccctcccagtccacctcatttagaaaaccaaagtgtgggtagaaaccccaaatgtccaaaagcccttttctggtgggtgacccagtgcatccaacagaaacagccgctgcccgaacctctgtgtgaagctttacgcgcacacggacaaaatgcccaaactggagcccttgcaaaaacacggcttgtggcattggcatacttgcccttacaggtggagtatcttcgtcacacatctaaatgagaaatcagtgacaacaagtctttgaaatggtgctatggatttaccattccttattatcactaatcatctaaacaactcactggaaatccaattaacaattttacaacataagatagaatggagacctgaataattctgtgtaatataaatggtttataactgcttttgtacctagctaggctgctattattactataatgagtaaatcataaagccttcatcactcccacatttttcttacggtcggagcatcagaacaagcgtctagactccttgggaccgtgagttcctagagcttggctgggtctaggctgttctgtgcctccaaggactgtctggcaatgacttgtattggccaccaactgtagatgtatatatggtgcccttctgatgctaagactccagaccttttgtttttgctttgcattttctgattttataccaactgtgtggactaagatgcattaaaataaacatcagagtaactca

SEQ ID NO: 59 - DNA, 483 bp, Artificial Sequence
  Pmp22 Coding sequence
atgctcctcctgttgctgagtatcatcgtcctccacgtcgcggtgctggtgctgctgttcgtctccacgatcgtcagccaatggatcgtgggcaatggacacgcaactgatctctggcagaactgtagcacctcttcctcaggaaatgtccaccactgtttctcatcatcaccaaacgaatggctgcagtctgtccaggccaccatgatcctgtcgatcatcttcagcattctgtctctgttcctgttcttctgccaactcttcaccctcaccaaggggggcaggttttacatcactggaatcttccaaattcttgctggtctgtgcgtgatgagtgctgcggccatctacacggtgaggcacccggagtggcatctcaactcggattactcctacggtttcgcctacatcctggcctgggtggccttccccctggcccttctcagcggtgtcatctatgtgatcttgcggaaacgcgaatga

SEQ ID NO: 60 - protein, 160 aa, Artificial Sequence
  Pmp protein sequence
MLLLLLSIIVLHVAVLVLLFVSTIVSQWIVGNGHATDLWQNCSTSSSGNVHHCFSSSPNEWLQSVQATMILSIIFSILSLFLFFCQLFTLTKGGRFYITGIFQILAGLCVMSAAAIYTVRHPEWHLNSDYSYGFAYILAWVAFPLALLSGVIYVILRKRE

SEQ ID NO: 61 - DNA, 16 bp, Artificial Sequence
  Nucleic Acid Sequence
atcttcaatcaacagc

SEQ ID NO: 62 - DNA, 17 bp, Artificial Sequence
  Antisense Oligonucleotide
caaacagcgtaacccct

SEQ ID NO: 63 - DNA, 20 bp, Artificial Sequence
  Antisense Oligonucleotide
cgtggaggacgatgatactc

SEQ ID NO: 64 - DNA, 20 bp, Artificial Sequence
  Antisense Oligonucleotide
gacgtggaggacgatgatac

SEQ ID NO: 65 - DNA, 20 bp, Artificial Sequence
  Antisense Oligonucleotide
agcaccgcgacgtggaggac

SEQ ID NO: 66 - DNA, 20 bp, Artificial Sequence
  Antisense Oligonucleotide
ctgacgatcgtggagacgaa

SEQ ID NO: 67 - DNA, 20 bp, Artificial Sequence
  Antisense Oligonucleotide
cattggctgacgatcgtgga

SEQ ID NO: 68 - DNA, 20 bp, Artificial Sequence
  Antisense Oligonucleotide
agactgcagccattcgtttg

SEQ ID NO: 69 - DNA, 20 bp, Artificial Sequence
  Antisense Oligonucleotide
gacagactgcagccattcgt

SEQ ID NO: 70 - DNA, 20 bp, Artificial Sequence
  Antisense Oligonucleotide
tggacagactgcagccattc

SEQ ID NO: 71 - DNA, 20 bp, Artificial Sequence
  Antisense Oligonucleotide
atgctgaagatgatcgacag

SEQ ID NO: 72 - DNA, 20 bp, Artificial Sequence
  Antisense Oligonucleotide
gtaaaacctgccccccttgg

SEQ ID NO: 73 - DNA, 20 bp, Artificial Sequence
  Antisense Oligonucleotide
taggagtaatccgagttgag

SEQ ID NO: 74 - DNA, 20 bp, Artificial Sequence
  Antisense Oligonucleotide
tcattcgcgtttccgcaaga

SEQ ID NO: 75 - DNA, 20 bp, Artificial Sequence
  Antisense Oligonucleotide
ctcattcgcgtttccgcaag

SEQ ID NO: 76 - DNA, 20 bp, Artificial Sequence
  Antisense Oligonucleotide
cctcattcgcgtttccgcaa

SEQ ID NO: 77 - DNA, 20 bp, Artificial Sequence
  Antisense Oligonucleotide
gcctcattcgcgtttccgca

SEQ ID NO: 78 - DNA, 17 bp, Artificial Sequence
  Antisense Oligonucleotide
ctcattcgcgtttccgc

SEQ ID NO: 79 - DNA, 16 bp, Artificial Sequence
  Antisense Oligonucleotide
ctcattcgcgtttccg

SEQ ID NO: 80 - DNA, 16 bp, Artificial Sequence
  Antisense Oligonucleotide
gcctcattcgcgtttc

SEQ ID NO: 81 - DNA, 20 bp, Artificial Sequence
  Antisense Oligonucleotide
ctttaaggctcaacacgagg

SEQ ID NO: 82 - DNA, 20 bp, Artificial Sequence
  Antisense Oligonucleotide
tctttaaggctcaacacgag

SEQ ID NO: 83 - DNA, 20 bp, Artificial Sequence
  Antisense Oligonucleotide
gggtttctacccacactttg

SEQ ID NO: 84 - DNA, 20 bp, Artificial Sequence
  Antisense Oligonucleotide
ttggggtttctacccacact

SEQ ID NO: 85 - DNA, 20 bp, Artificial Sequence
  Antisense Oligonucleotide
cacctgtaagggcaagtatg

SEQ ID NO: 86 - DNA, 20 bp, Artificial Sequence
  Antisense Oligonucleotide
ttagatgtgtgacgaagata

SEQ ID NO: 87 - DNA, 20 bp, Artificial Sequence
  Antisense Oligonucleotide
tttagatgtgtgacgaagat

SEQ ID NO: 88 - DNA, 20 bp, Artificial Sequence
  Antisense Oligonucleotide
catttagatgtgtgacgaag

SEQ ID NO: 89 - DNA, 20 bp, Artificial Sequence
  Antisense Oligonucleotide
ggtaaatccatagcaccatt

SEQ ID NO: 90 - DNA, 20 bp, Artificial Sequence
  Antisense Oligonucleotide
tccagtgagttgtttagatg

SEQ ID NO: 91 - DNA, 20 bp, Artificial Sequence
  Antisense Oligonucleotide
cacggtcccaaggagtctag

SEQ ID NO: 92 - DNA, 20 bp, Artificial Sequence
  Antisense Oligonucleotide
tcacggtcccaaggagtcta

SEQ ID NO: 93 - DNA, 20 bp, Artificial Sequence
  Antisense Oligonucleotide
aggaactcacggtcccaagg

SEQ ID NO: 94 - DNA, 20 bp, Artificial Sequence
  Antisense Oligonucleotide
taggaactcacggtcccaag

SEQ ID NO: 95 - DNA, 20 bp, Artificial Sequence
  Antisense Oligonucleotide
gtggccaatacaagtcattg

SEQ ID NO: 96-100 - skipped (5 entries)

SEQ ID NO: 101 - DNA, 20 bp, Artificial Sequence
  Antisense Oligonucleotide
ggctcgatccaggagtgtgt

SEQ ID NO: 102 - DNA, 20 bp, Artificial Sequence
  Antisense Oligonucleotide
ttggctcgatccaggagtgt

SEQ ID NO: 103 - DNA, 20 bp, Artificial Sequence
  Antisense Oligonucleotide
ctcctgttggctcgatccag

SEQ ID NO: 104 - DNA, 20 bp, Artificial Sequence
  Antisense Oligonucleotide
gcgggtgcttgccatcttca

SEQ ID NO: 105 - DNA, 20 bp, Artificial Sequence
  Antisense Oligonucleotide
ggatagtcctctaagtgcat

SEQ ID NO: 106 - DNA, 20 bp, Artificial Sequence
  Antisense Oligonucleotide
ggctagatccacatggtctg

SEQ ID NO: 107 - DNA, 20 bp, Artificial Sequence
  Antisense Oligonucleotide
tagcgtggctagatccacat

SEQ ID NO: 108 - DNA, 20 bp, Artificial Sequence
  Antisense Oligonucleotide
ttagcgtggctagatccaca

SEQ ID NO: 109 - DNA, 20 bp, Artificial Sequence
  Antisense Oligonucleotide
attagcgtggctagatccac

SEQ ID NO: 110 - DNA, 20 bp, Artificial Sequence
  Antisense Oligonucleotide
tcattagcgtggctagatcc

SEQ ID NO: 111 - DNA, 20 bp, Artificial Sequence
  Antisense Oligonucleotide
atcattagcgtggctagatc

SEQ ID NO: 112 - DNA, 20 bp, Artificial Sequence
  Antisense Oligonucleotide
gcgaagatccacacggccat

SEQ ID NO: 113 - DNA, 20 bp, Artificial Sequence
  Antisense Oligonucleotide
atcgcagcgaagatccacac

SEQ ID NO: 114 - DNA, 20 bp, Artificial Sequence
  Antisense Oligonucleotide
gttgatcgcagcgaagatcc

SEQ ID NO: 115 - DNA, 20 bp, Artificial Sequence
  Antisense Oligonucleotide
ctgttgatcgcagcgaagat

SEQ ID NO: 116 - DNA, 20 bp, Artificial Sequence
  Antisense Oligonucleotide
ctcctgttgatcgcagcgaa

SEQ ID NO: 117 - DNA, 20 bp, Artificial Sequence
  Antisense Oligonucleotide
tctcctgttgatcgcagcga

SEQ ID NO: 118 - DNA, 20 bp, Artificial Sequence
  Antisense Oligonucleotide
ctctcctgttgatcgcagcg

SEQ ID NO: 119 - DNA, 20 bp, Artificial Sequence
  Antisense Oligonucleotide
ctgaaccccacttcggctca

SEQ ID NO: 120 - DNA, 20 bp, Artificial Sequence
  Antisense Oligonucleotide
attatctgaaccccacttcg

SEQ ID NO: 121 - DNA, 20 bp, Artificial Sequence
  Antisense Oligonucleotide
cacgtgcattatctgaaccc

SEQ ID NO: 122 - DNA, 20 bp, Artificial Sequence
  Antisense Oligonucleotide
tcgaaaggtactccagtaaa

SEQ ID NO: 123 - DNA, 20 bp, Artificial Sequence
  Antisense Oligonucleotide
gattctcgaaaggtactcca

SEQ ID NO: 124 - DNA, 20 bp, Artificial Sequence
  Antisense Oligonucleotide
atagagattctcgaaaggta

SEQ ID NO: 125 - DNA, 20 bp, Artificial Sequence
  Antisense Oligonucleotide
cacgtactttctgtacttct

SEQ ID NO: 126 - DNA, 20 bp, Artificial Sequence
  Antisense Oligonucleotide
tggaatctgcttctcacgta

SEQ ID NO: 127 - DNA, 20 bp, Artificial Sequence
  Antisense Oligonucleotide
cgggcattcctgtcttcaat

SEQ ID NO: 128 - DNA, 20 bp, Artificial Sequence
  Antisense Oligonucleotide
acccagacgggcattcctgt

SEQ ID NO: 129 - DNA, 20 bp, Artificial Sequence
  Antisense Oligonucleotide
cgtttgttgaggctcacact

SEQ ID NO: 130 - DNA, 20 bp, Artificial Sequence
  Antisense Oligonucleotide
tgtagcgtttgttgaggctc

SEQ ID NO: 131 - DNA, 20 bp, Artificial Sequence
  Antisense Oligonucleotide
agtcgtgtgtagcgtttgtt

SEQ ID NO: 132 - DNA, 20 bp, Artificial Sequence
  Antisense Oligonucleotide
cagtcgtgtgtagcgtttgt

SEQ ID NO: 133 - DNA, 20 bp, Artificial Sequence
  Antisense Oligonucleotide
gcagtcgtgtgtagcgtttg

SEQ ID NO: 134 - DNA, 20 bp, Artificial Sequence
  Antisense Oligonucleotide
cgcagtcgtgtgtagcgttt

SEQ ID NO: 135 - DNA, 20 bp, Artificial Sequence
  Antisense Oligonucleotide
acgtcttggtcttgccgatg

SEQ ID NO: 136 - DNA, 20 bp, Artificial Sequence
  Antisense Oligonucleotide
cacgtcttggtcttgccgat

SEQ ID NO: 137 - DNA, 20 bp, Artificial Sequence
  Antisense Oligonucleotide
atcttaatgggactcacggg

SEQ ID NO: 138 - DNA, 20 bp, Artificial Sequence
  Antisense Oligonucleotide
ccatcttaatgggactcacg

SEQ ID NO: 139 - DNA, 20 bp, Artificial Sequence
  Antisense Oligonucleotide
actccatcttaatgggactc

SEQ ID NO: 140 - DNA, 20 bp, Artificial Sequence
  Antisense Oligonucleotide
tagtcaaacctgtcttggta

SEQ ID NO: 141 - DNA, 20 bp, Artificial Sequence
  Antisense Oligonucleotide
gctcatgatcaggtccccca

SEQ ID NO: 142 - DNA, 20 bp, Artificial Sequence
  Antisense Oligonucleotide
ggcagcagctcatgatcagg

SEQ ID NO: 143 - DNA, 20 bp, Artificial Sequence
  Antisense Oligonucleotide
cgtcaaaggcaccttgcagc

SEQ ID NO: 144 - DNA, 20 bp, Artificial Sequence
  Antisense Oligonucleotide
tgtgctcgtcaaaggcacct

SEQ ID NO: 145 - DNA, 20 bp, Artificial Sequence
  Antisense Oligonucleotide
gtcctatgtgctcgtcaaag

SEQ ID NO: 146 - DNA, 20 bp, Artificial Sequence
  Antisense Oligonucleotide
cggtcctatgtgctcgtcaa

SEQ ID NO: 147 - DNA, 20 bp, Artificial Sequence
  Antisense Oligonucleotide
agcggtcctatgtgctcgtc

SEQ ID NO: 148 - DNA, 20 bp, Artificial Sequence
  Antisense Oligonucleotide
gagcggtcctatgtgctcgt

SEQ ID NO: 149 - DNA, 20 bp, Artificial Sequence
  Antisense Oligonucleotide
agagcggtcctatgtgctcg

SEQ ID NO: 150 - DNA, 20 bp, Artificial Sequence
  Antisense Oligonucleotide
cagtgcagagcggtcctatg

SEQ ID NO: 151 - DNA, 20 bp, Artificial Sequence
  Antisense Oligonucleotide
ccagtcagtgcagagcggtc

SEQ ID NO: 152 - DNA, 20 bp, Artificial Sequence
  Antisense Oligonucleotide
tcggccttctgccagtcagt

SEQ ID NO: 153 - DNA, 20 bp, Artificial Sequence
  Antisense Oligonucleotide
gaatgtctccccgctcggcc

SEQ ID NO: 154 - DNA, 20 bp, Artificial Sequence
  Antisense Oligonucleotide
gagaatgtctccccgctcgg

SEQ ID NO: 155 - DNA, 20 bp, Artificial Sequence
  Antisense Oligonucleotide
caggagaatgtctccccgct

SEQ ID NO: 156 - DNA, 20 bp, Artificial Sequence
  Antisense Oligonucleotide
gatctccacatgccgaggat

SEQ ID NO: 157 - DNA, 20 bp, Artificial Sequence
  Antisense Oligonucleotide
ttctcctgaatcagactgaa

SEQ ID NO: 158 - DNA, 20 bp, Artificial Sequence
  Antisense Oligonucleotide
cagtccagtgcacacgatcc

SEQ ID NO: 159 - DNA, 20 bp, Artificial Sequence
  Antisense Oligonucleotide
tacatggcggcaaagaactc

SEQ ID NO: 160 - DNA, 20 bp, Artificial Sequence
  Antisense Oligonucleotide
cgaatttgccatagttttcc

SEQ ID NO: 161 - DNA, 20 bp, Artificial Sequence
  Antisense Oligonucleotide
ccaaagaggaaacgtacaac

SEQ ID NO: 162 - DNA, 20 bp, Artificial Sequence
  Antisense Oligonucleotide
gcctgatttgctgagagatc

SEQ ID NO: 163 - DNA, 20 bp, Artificial Sequence
  Antisense Oligonucleotide
catctcgtacaaacagtaga

SEQ ID NO: 164 - DNA, 20 bp, Artificial Sequence
  Antisense Oligonucleotide
gcatctcgtacaaacagtag

SEQ ID NO: 165 - DNA, 20 bp, Artificial Sequence
  Antisense Oligonucleotide
atggccctttgcacgaagtc

SEQ ID NO: 166 - DNA, 20 bp, Artificial Sequence
  Antisense Oligonucleotide
agtccatggccctttgcacg

SEQ ID NO: 167 - DNA, 20 bp, Artificial Sequence
  Antisense Oligonucleotide
agagattgatctcaatcttg

SEQ ID NO: 168 - DNA, 20 bp, Artificial Sequence
  Antisense Oligonucleotide
gatgacagttctcaatgcaa

SEQ ID NO: 169 - DNA, 20 bp, Artificial Sequence
  Antisense Oligonucleotide
cacccgatgacagttctcaa

SEQ ID NO: 170 - DNA, 20 bp, Artificial Sequence
  Antisense Oligonucleotide
gactccacccgatgacagtt

SEQ ID NO: 171 - DNA, 20 bp, Artificial Sequence
  Antisense Oligonucleotide
aaggtgtcggccttcctttt

SEQ ID NO: 172 - DNA, 20 bp, Artificial Sequence
  Antisense Oligonucleotide
catatcaaggtgtcggcctt

SEQ ID NO: 173 - DNA, 20 bp, Artificial Sequence
  Antisense Oligonucleotide
cagcactcatgcgagaggcc

SEQ ID NO: 174 - DNA, 20 bp, Artificial Sequence
  Antisense Oligonucleotide
gtcgaagcagcactcatgcg

SEQ ID NO: 175 - DNA, 20 bp, Artificial Sequence
  Antisense Oligonucleotide
gaggaccaaggagatgtcga

SEQ ID NO: 176 - DNA, 20 bp, Artificial Sequence
  Antisense Oligonucleotide
tggttgctgctgaggaccaa

SEQ ID NO: 177 - DNA, 20 bp, Artificial Sequence
  Antisense Oligonucleotide
gattgcacaacaggtgcttc

SEQ ID NO: 178 - DNA, 20 bp, Artificial Sequence
  Antisense Oligonucleotide
ggtgcgtgagattctgatta

SEQ ID NO: 179 - DNA, 20 bp, Artificial Sequence
  Antisense Oligonucleotide
gtaaaggtgcgtgagattct

SEQ ID NO: 180 - DNA, 20 bp, Artificial Sequence
  Antisense Oligonucleotide
ctcgcaggtaaaggtgcgtg

SEQ ID NO: 181 - DNA, 20 bp, Artificial Sequence
  Antisense Oligonucleotide
cctcgcaggtaaaggtgcgt

SEQ ID NO: 182 - DNA, 20 bp, Artificial Sequence
  Antisense Oligonucleotide
gttgcctcgcaggtaaaggt

SEQ ID NO: 183 - DNA, 20 bp, Artificial Sequence
  Antisense Oligonucleotide
agagtgttgcctcgcaggta

SEQ ID NO: 184 - DNA, 20 bp, Artificial Sequence
  Antisense Oligonucleotide
cgagagtgttgcctcgcagg

SEQ ID NO: 185 - DNA, 20 bp, Artificial Sequence
  Antisense Oligonucleotide
tccgagagtgttgcctcgca

SEQ ID NO: 186 - DNA, 20 bp, Artificial Sequence
  Antisense Oligonucleotide
ctccgagagtgttgcctcgc

SEQ ID NO: 187 - DNA, 20 bp, Artificial Sequence
  Antisense Oligonucleotide
tctccgagagtgttgcctcg

SEQ ID NO: 188 - DNA, 20 bp, Artificial Sequence
  Antisense Oligonucleotide
cttgtctccgagagtgttgc

SEQ ID NO: 189 - DNA, 20 bp, Artificial Sequence
  Antisense Oligonucleotide
gatccccttgtctccgagag

SEQ ID NO: 190 - DNA, 20 bp, Artificial Sequence
  Antisense Oligonucleotide
acctgaagcttgcagtcggg

SEQ ID NO: 191 - DNA, 20 bp, Artificial Sequence
  Antisense Oligonucleotide
gcagttgtctaattccaaca

SEQ ID NO: 192 - DNA, 20 bp, Artificial Sequence
  Antisense Oligonucleotide
aggttgcagttgtctaattc

SEQ ID NO: 193 - DNA, 20 bp, Artificial Sequence
  Antisense Oligonucleotide
gtgacgtgaggttgcagttg

SEQ ID NO: 194 - DNA, 20 bp, Artificial Sequence
  Antisense Oligonucleotide
gcagtgtgacgtgaggttgc

SEQ ID NO: 195 - DNA, 20 bp, Artificial Sequence
  Antisense Oligonucleotide
gctcagctttcgcaggctct

SEQ ID NO: 196 - DNA, 20 bp, Artificial Sequence
  Antisense Oligonucleotide
gtcgcccaggtcattgttgc

SEQ ID NO: 197 - DNA, 20 bp, Artificial Sequence
  Antisense Oligonucleotide
atcatgacccccaggtcgcc

SEQ ID NO: 198 - DNA, 20 bp, Artificial Sequence
  Antisense Oligonucleotide
acatcctctaactgaggcgc

SEQ ID NO: 199 - DNA, 20 bp, Artificial Sequence
  Antisense Oligonucleotide
ccaagaggaacatcctctaa

SEQ ID NO: 200 - DNA, 20 bp, Artificial Sequence
  Antisense Oligonucleotide
gttatggtcagttaatagaa

SEQ ID NO: 201 - DNA, 20 bp, Artificial Sequence
  Antisense Oligonucleotide
caccagggaacatctcgggg

SEQ ID NO: 202 - DNA, 20 bp, Artificial Sequence
  Antisense Oligonucleotide
accagggaacatctcgggga

SEQ ID NO: 203 - DNA, 20 bp, Artificial Sequence
  Antisense Oligonucleotide
ccagggaacatctcggggag

SEQ ID NO: 204 - DNA, 20 bp, Artificial Sequence
  Antisense Oligonucleotide
gggaacatctcggggagcct

SEQ ID NO: 205 - DNA, 20 bp, Artificial Sequence
  Antisense Oligonucleotide
ggaacatctcggggagcctg

SEQ ID NO: 206 - DNA, 20 bp, Artificial Sequence
  Antisense Oligonucleotide
gagcctggttggaagctgca

SEQ ID NO: 207 - DNA, 17 bp, Artificial Sequence
  Antisense Oligonucleotide
gcaggcttagtctgtcg

SEQ ID NO: 208 - DNA, 15 bp, Artificial Sequence
  Antisense Oligonucleotide
aggcttagtctgtcg

SEQ ID NO: 209 - DNA, 17 bp, Artificial Sequence
  Antisense Oligonucleotide
ttagtctgtcggctgcg

SEQ ID NO: 210 - DNA, 20 bp, Artificial Sequence
  Antisense Oligonucleotide
gcttggaagaaggggttacg

SEQ ID NO: 211 - DNA, 20 bp, Artificial Sequence
  Antisense Oligonucleotide
gaagaaggggttacgctgtt

SEQ ID NO: 212 - DNA, 20 bp, Artificial Sequence
  Antisense Oligonucleotide
aagaaggggttacgctgttt

SEQ ID NO: 213 - DNA, 20 bp, Artificial Sequence
  Antisense Oligonucleotide
agaaggggttacgctgtttg

SEQ ID NO: 214 - DNA, 20 bp, Artificial Sequence
  Antisense Oligonucleotide
gaaggggttacgctgtttgg

SEQ ID NO: 215 - DNA, 20 bp, Artificial Sequence
  Antisense Oligonucleotide
aaggggttacgctgtttggc

SEQ ID NO: 216 - DNA, 15 bp, Artificial Sequence
  Antisense Oligonucleotide
aggggttacgctgtt

SEQ ID NO: 217 - DNA, 15 bp, Artificial Sequence
  Antisense Oligonucleotide
ggttacgctgtttgg

SEQ ID NO: 218 - DNA, 17 bp, Artificial Sequence
  Antisense Oligonucleotide
gttacgctgtttggccg

SEQ ID NO: 219 - DNA, 15 bp, Artificial Sequence
  Antisense Oligonucleotide
gttacgctgtttggc

SEQ ID NO: 220 - DNA, 17 bp, Artificial Sequence
  Antisense Oligonucleotide
ttacgctgtttggccgg

SEQ ID NO: 221 - DNA, 20 bp, Artificial Sequence
  Antisense Oligonucleotide
tacgctgtttggccgggcag

SEQ ID NO: 222 - DNA, 20 bp, Artificial Sequence
  Antisense Oligonucleotide
acgctgtttggccgggcaga

SEQ ID NO: 223 - DNA, 20 bp, Artificial Sequence
  Antisense Oligonucleotide
cgctgtttggccgggcagaa

SEQ ID NO: 224 - DNA, 20 bp, Artificial Sequence
  Antisense Oligonucleotide
gctgtttggccgggcagaaa

SEQ ID NO: 225 - DNA, 20 bp, Artificial Sequence
  Antisense Oligonucleotide
ctgtttggccgggcagaaac

SEQ ID NO: 226 - DNA, 20 bp, Artificial Sequence
  Antisense Oligonucleotide
tgtttggccgggcagaaact

SEQ ID NO: 227 - DNA, 20 bp, Artificial Sequence
  Antisense Oligonucleotide
gtttggccgggcagaaactc

SEQ ID NO: 228 - DNA, 20 bp, Artificial Sequence
  Antisense Oligonucleotide
ttggccgggcagaaactccg

SEQ ID NO: 229 - DNA, 20 bp, Artificial Sequence
  Antisense Oligonucleotide
tggccgggcagaaactccgc

SEQ ID NO: 230 - DNA, 20 bp, Artificial Sequence
  Antisense Oligonucleotide
ggccgggcagaaactccgct

SEQ ID NO: 231 - DNA, 20 bp, Artificial Sequence
  Antisense Oligonucleotide
gccgggcagaaactccgctg

SEQ ID NO: 232 - DNA, 20 bp, Artificial Sequence
  Antisense Oligonucleotide
ccgggcagaaactccgctga

SEQ ID NO: 233 - DNA, 20 bp, Artificial Sequence
  Antisense Oligonucleotide
cgggcagaaactccgctgag

SEQ ID NO: 234 - DNA, 20 bp, Artificial Sequence
  Antisense Oligonucleotide
gggcagaaactccgctgagc

SEQ ID NO: 235 - DNA, 20 bp, Artificial Sequence
  Antisense Oligonucleotide
ggcagaaactccgctgagca

SEQ ID NO: 236 - DNA, 20 bp, Artificial Sequence
  Antisense Oligonucleotide
ccccgagatgttccctggtg

SEQ ID NO: 237 - DNA, 20 bp, Artificial Sequence
  Antisense Oligonucleotide
tccccgagatgttccctggt

SEQ ID NO: 238 - DNA, 20 bp, Artificial Sequence
  Antisense Oligonucleotide
ctccccgagatgttccctgg

SEQ ID NO: 239 - DNA, 20 bp, Artificial Sequence
  Antisense Oligonucleotide
aggctccccgagatgttccc

SEQ ID NO: 240 - DNA, 20 bp, Artificial Sequence
  Antisense Oligonucleotide
caggctccccgagatgttcc

SEQ ID NO: 241 - DNA, 20 bp, Artificial Sequence
  Antisense Oligonucleotide
tgcagcttccaaccaggctc

SEQ ID NO: 242 - DNA, 17 bp, Artificial Sequence
  Antisense Oligonucleotide
cgacagactaagcctgc

SEQ ID NO: 243 - DNA, 15 bp, Artificial Sequence
  Antisense Oligonucleotide
cgacagactaagcct

SEQ ID NO: 244 - DNA, 17 bp, Artificial Sequence
  Antisense Oligonucleotide
cgcagccgacagactaa

SEQ ID NO: 245 - DNA, 20 bp, Artificial Sequence
  Antisense Oligonucleotide
cgtaaccccttcttccaagc

SEQ ID NO: 246 - DNA, 20 bp, Artificial Sequence
  Antisense Oligonucleotide
aacagcgtaaccccttcttc

SEQ ID NO: 247 - DNA, 20 bp, Artificial Sequence
  Antisense Oligonucleotide
aaacagcgtaaccccttctt

SEQ ID NO: 248 - DNA, 20 bp, Artificial Sequence
  Antisense Oligonucleotide
caaacagcgtaaccccttct

SEQ ID NO: 249 - DNA, 20 bp, Artificial Sequence
  Antisense Oligonucleotide
ccaaacagcgtaaccccttc

SEQ ID NO: 250 - DNA, 20 bp, Artificial Sequence
  Antisense Oligonucleotide
gccaaacagcgtaacccctt

SEQ ID NO: 251 - DNA, 15 bp, Artificial Sequence
  Antisense Oligonucleotide
aacagcgtaacccct

SEQ ID NO: 252 - DNA, 15 bp, Artificial Sequence
  Antisense Oligonucleotide
ccaaacagcgtaacc

SEQ ID NO: 253 - DNA, 17 bp, Artificial Sequence
  Antisense Oligonucleotide
cggccaaacagcgtaac

SEQ ID NO: 254 - DNA, 15 bp, Artificial Sequence
  Antisense Oligonucleotide
gccaaacagcgtaac

SEQ ID NO: 255 - DNA, 17 bp, Artificial Sequence
  Antisense Oligonucleotide
ccggccaaacagcgtaa

SEQ ID NO: 256 - DNA, 20 bp, Artificial Sequence
  Antisense Oligonucleotide
ctgcccggccaaacagcgta

SEQ ID NO: 257 - DNA, 20 bp, Artificial Sequence
  Antisense Oligonucleotide
tctgcccggccaaacagcgt

SEQ ID NO: 258 - DNA, 20 bp, Artificial Sequence
  Antisense Oligonucleotide
ttctgcccggccaaacagcg

SEQ ID NO: 259 - DNA, 20 bp, Artificial Sequence
  Antisense Oligonucleotide
tttctgcccggccaaacagc

SEQ ID NO: 260 - DNA, 20 bp, Artificial Sequence
  Antisense Oligonucleotide
gtttctgcccggccaaacag

SEQ ID NO: 261 - DNA, 20 bp, Artificial Sequence
  Antisense Oligonucleotide
agtttctgcccggccaaaca

SEQ ID NO: 262 - DNA, 20 bp, Artificial Sequence
  Antisense Oligonucleotide
gagtttctgcccggccaaac

SEQ ID NO: 263 - DNA, 20 bp, Artificial Sequence
  Antisense Oligonucleotide
cggagtttctgcccggccaa

SEQ ID NO: 264 - DNA, 20 bp, Artificial Sequence
  Antisense Oligonucleotide
gcggagtttctgcccggcca

SEQ ID NO: 265 - DNA, 20 bp, Artificial Sequence
  Antisense Oligonucleotide
agcggagtttctgcccggcc

SEQ ID NO: 266 - DNA, 20 bp, Artificial Sequence
  Antisense Oligonucleotide
cagcggagtttctgcccggc

SEQ ID NO: 267 - DNA, 20 bp, Artificial Sequence
  Antisense Oligonucleotide
tcagcggagtttctgcccgg

SEQ ID NO: 268 - DNA, 20 bp, Artificial Sequence
  Antisense Oligonucleotide
ctcagcggagtttctgcccg

SEQ ID NO: 269 - DNA, 20 bp, Artificial Sequence
  Antisense Oligonucleotide
gctcagcggagtttctgccc

SEQ ID NO: 270 - DNA, 20 bp, Artificial Sequence
  Antisense Oligonucleotide
tgctcagcggagtttctgcc

SEQ ID NO: 271-300 - skipped (30 entries)

SEQ ID NO: 301 - protein, 879 aa, Artificial Sequence
  PrX - PTGFRN
MGRLASRPLLLALLSLALCRGRVVRVPTATLVRVVGTELVIPCNVSDYDGPSEQNFDWSFSSLGSSFVELASTWEVGFPAQLYQERLQRGEILLRRTANDAVELHIKNVQPSDQGHYKCSTPSTDATVQGNYEDTVQVKVLADSLHVGPSARPPPSLSLREGEPFELRCTAASASPLHTHLALLWEVHRGPARRSVLALTHEGRFHPGLGYEQRYHSGDVRLDTVGSDAYRLSVSRALSADQGSYRCIVSEWIAEQGNWQEIQEKAVEVATVVIQPSVLRAAVPKNVSVAEGKELDLTCNITTDRADDVRPEVTWSFSRMPDSTLPGSRVLARLDRDSLVHSSPHVALSHVDARSYHLLVRDVSKENSGYYYCHVSLWAPGHNRSWHKVAEAVSSPAGVGVTWLEPDYQVYLNASKVPGFADDPTELACRVVDTKSGEANVRFTVSWYYRMNRRSDNVVTSELLAVMDGDWTLKYGERSKQRAQDGDFIFSKEHTDTFNFRIQRTTEEDRGNYYCVVSAWTKQRNNSWVKSKDVFSKPVNIFWALEDSVLVVKARQPKPFFAAGNTFEMTCKVSSKNIKSPRYSVLIMAEKPVGDLSSPNETKYIISLDQDSVVKLENWTDASRVDGVVLEKVQEDEFRYRMYQTQVSDAGLYRCMVTAWSPVRGSLWREAATSLSNPIEIDFQTSGPIFNASVHSDTPSVIRGDLIKLFCIITVEGAALDPDDMAFDVSWFAVHSFGLDKAPVLLSSLDRKGIVTTSRRDWKSDLSLERVSVLEFLLQVHGSEDQDFGNYYCSVTPWVKSPTGSWQKEAEIHSKPVFITVKMDVLNAFKYPLLIGVGLSTVIGLLSCLIGYCSSHWCCKKEVQETRRERRRLMSMEMD

SEQ ID NO: 302 - protein, 192 aa, Artificial Sequence
  PrX - PTGFRN fragment
GPIFNASVHSDTPSVIRGDLIKLFCIITVEGAALDPDDMAFDVSWFAVHSFGLDKAPVLLSSLDRKGIVTTSRRDWKSDLSLERVSVLEFLLQVHGSEDQDFGNYYCSVTPWVKSPTGSWQKEAEIHSKPVFITVKMDVLNAFKYPLLIGVGLSTVIGLLSCLIGYCSSHWCCKKEVQETRRERRRLMSMEM

SEQ ID NO: 303 - protein, 385 aa, Artificial Sequence
  BSG Protein
MAAALFVLLGFALLGTHGASGAAGFVQAPLSQQRWVGGSVELHCEAVGSPVPEIQWWFEGQGPNDTCSQLWDGARLDRVHIHATYHQHAASTISIDTLVEEDTGTYECRASNDPDRNHLTRAPRVKWVRAQAVVLVLEPGTVFTTVEDLGSKILLTCSLNDSATEVTGHRWLKGGVVLKEDALPGQKTEFKVDSDDQWGEYSCVFLPEPMGTANIQLHGPPRVKAVKSSEHINEGETAMLVCKSESVPPVTDWAWYKITDSEDKALMNGSESRFFVSSSQGRSELHIENLNMEADPGQYRCNGTSSKGSDQAIITLRVRSHLAALWPFLGIVAEVLVLVTIIFIYEKRRKPEDVLDDDDAGSAPLKSSGQHQNDKGKNVRQRNSS

SEQ ID NO: 304 - protein, 613 aa, Artificial Sequence
  The IGSF8 protein
MGALRPTLLPPSLPLLLLLMLGMGCWAREVLVPEGPLYRVAGTAVSISCNVTGYEGPAQQNFEWFLYRPEAPDTALGIVSTKDTQFSYAVFKSRVVAGEVQVQRLQGDAVVLKIARLQAQDAGIYECHTPSTDTRYLGSYSGKVELRVLPDVLQVSAAPPGPRGRQAPTSPPRMTVHEGQELALGCLARTSTQKHTHLAVSFGRSVPEAPVGRSTLQEVVGIRSDLAVEAGAPYAERLAAGELRLGKEGTDRYRMVVGGAQAGDAGTYHCTAAEWIQDPDGSWAQIAEKRAVLAHVDVQTLSSQLAVTVGPGERRIGPGEPLELLCNVSGALPPAGRHAAYSVGWEMAPAGAPGPGRLVAQLDTEGVGSLGPGYEGRHIAMEKVASRTYRLRLEAARPGDAGTYRCLAKAYVRGSGTRLREAASARSRPLPVHVREEGVVLEAVAWLAGGTVYRGETASLLCNISVRGGPPGLRLAASWWVERPEDGELSSVPAQLVGGVGQDGVAELGVRPGGGPVSVELVGPRSHRLRLHSLGPEDEGVYHCAPSAWVQHADYSWYQAGSARSGPVTVYPYMHALDTLFVPLLVGTGVALVTGATVLGTITCCFMKRLRKR

SEQ ID NO: 305 - protein, 748 aa, Artificial Sequence
  The ITGB1 protein
MNLQPIFWIGLISSVCCVFAQTDENRCLKANAKSCGECIQAGPNCGWCTNSTFLQEGMPTSARCDDLEALKKKGCPPDDIENPRGSKDIKKNKNVTNRSKGTAEKLKPEDITQIQPQQLVLRLRSGEPQTFTLKFKRAEDYPIDLYYLMDLSYSMKDDLENVKSLGTDLMNEMRRITSDFRIGFGSFVEKTVMPYISTTPAKLRNPCTSEQNCTSPFSYKNVLSLTNKGEVFNELVGKQRISGNLDSPEGGFDAIMQVAVCGSLIGWRNVTRLLVFSTDAGFHFAGDGKLGGIVLPNDGQCHLENNMYTMSHYYDYPSIAHLVQKLSENNIQTIFAVTEEFQPVYKELKNLIPKSAVGTLSANSSNVIQLIIDAYNSLSSEVILENGKLSEGVTISYKSYCKNGVNGTGENGRKCSNISIGDEVQFEISITSNKCPKKDSDSFKIRPLGFTEEVEVILQYICECECQSEGIPESPKCHEGNGTFECGACRCNEGRVGRHCECSTDEVNSEDMDAYCRKENSSEICSNNGECVCGQCVCRKRDNTNEIYSGASNGQICNGRGICECGVCKCTDPKFQGQTCEMCQTCLGVCAEHKECVQCRAFNKGEKKDTCTQECSYFNITKVESRDKLPQPVQPDPVSHCKEKDVDDCWFYFTYSVNGNNEVMVHVVENPECPTGPDIIPIVAGVVAGIVLIGLALLLIWKLLMIIHDRREFAKFEKEKMNAKWDTGENPIYKSAVTTVVNPKYEGK

SEQ ID NO: 306 - protein, 1032 aa, Artificial Sequence [sequence omitted]

SEQ ID NO: 307 - protein, 630 aa, Artificial Sequence
  The SLC3A2 Protein
MELQPPEASIAVVSIPRQLPGSHSEAGVQGLSAGDDSELGSHCVAQTGLELLASGDPLPSASQNAEMIETGSDCVTQAGLQLLASSDPPALASKNAEVTGTMSQDTEVDMKEVELNELEPEKQPMNAASGAAMSLAGAEKNGLVKIKVAEDEAEAAAAAKFTGLSKEELLKVAGSPGWVRTRWALLLLFWLGWLGMLAGAVVIIVRAPRCRELPAQKWWHTGALYRIGDLQAFQGHGAGNLAGLKGRLDYLSSLKVKGLVLGPIHKNQKDDVAQTDLLQIDPNFGSKEDFDSLLQSAKKKSIRVILDLTPNYRGENSWFSTQVDTVATKVKDALEFWLQAGVDGFQVRDIENLKDASSFLAEWQNITKGFSEDRLLIAGTNSSDLQQILSLLESNKDLLLTSSYLSDSGSTGEHTKSLVTQYLNATGNRWCSWSLSQARLLTSFLPAQLLRLYQLMLFTLPGTPVFSYGDEIGLDAAALPGQPMEAPVMLWDESSFPDIPGAVSANMTVKGQSEDPGSLLSLFRRLSDQRSKERSLLHGDFHAFSAGPGLFSYIRHWDQNERFLVVLNFGDVGLSAGLQASDLPASASLPAKADLLLSTQPGREEGSPLELERLKLEPHEGLLLRFPYAA

SEQ ID NO: 308 - protein, 1021 aa, Artificial Sequence
  IGSF2
MAGISYVASFFLLLTKLSIGQREVTVQKGPLFRAEGYPVSIGCNVTGHQGPSEQHFQWSVYLPTNPTQEVQIISTKDAAFSYAVYTQRVRSGDVYVERVQGNSVLLHISKLQMKDAGEYECHTPNTDEKYYGSYSAKTNLIVIPDTLSATMSSQTLGKEEGEPLALTCEASKATAQHTHLSVTWYLTQDGGGSQATEIISLSKDFILVPGPLYTERFAASDVQLNKLGPTTFRLSIERLQSSDQGQLFCEATEWIQDPDETWMFITKKQTDQTTLRIQPAVKDFQVNITADSLFAEGKPLELVCLVVSSGRDPQLQGIWFFNGTEIAHIDAGGVLGLKNDYKERASQGELQVSKLGPKAFSLKIFSLGPEDEGAYRCVVAEVMKTRTGSWQVLQRKQSPDSHVHLRKPAARSVVMSTKNKQQVVWEGETLAFLCKAGGAESPLSVSWWHIPRDQTQPEFVAGMGQDGIVQLGASYGVPSYHGNTRLEKMDWATFQLEITFTAITDSGTYECRVSEKSRNQARDLSWTQKISVTVKSLESSLQVSLMSRQPQVMLTNTFDLSCVVRAGYSDLKVPLTVTWQFQPASSHIFHQLIRITHNGTIEWGNFLSRFQKKTKVSQSLFRSQLLVHDATEEETGVYQCEVEVYDRNSLYNNRPPRASAISHPLRIAVTLPESKLKVNSRSQVQELSINSNTDIECSILSRSNGNLQLAIIWYFSPVSTNASWLKILEMDQTNVIKTGDEFHTPQRKQKFHTEKVSQDLFQLHILNVEDSDRGKYHCAVEEWLLSTNGTWHKLGEKKSGLTELKLKPTGSKVRVSKVYWTENVTEHREVAIRCSLESVGSSATLYSVMWYWNRENSGSKLLVHLQHDGLLEYGEEGLRRHLHCYRSSSTDFVLKLHQVEMEDAGMYWCRVAEWQLHGHPSKWINQASDESQRMVLTVLPSEPTLPSRICSSAPLLYFLFICPFVLLLLLLISLLCLYWKARKLSTLRSNTRKEKALWVDLKEAGGVTTNRREDEEEDEGN

SEQ ID NO: 309 - protein, 1195 aa, Artificial Sequence
  IGSF3
MKCFFPVLSCLAVLGVVSAQRQVTVQEGPLYRTEGSHITIWCNVSGYQGPSEQNFQWSIYLPSSPEREVQIVSTMDSSFPYAIYTQRVRGGKIFIERVQGNSTLLHITDLQARDAGEYECHTPSTDKQYFGSYSAKMNLVVIPDSLQTTAMPQTLHRVEQDPLELTCEVASETIQHSHLSVAWLRQKVGEKPVEVISLSRDFMLHSSSEYAQRQSLGEVRLDKLGRTTFRLTIFHLQPSDQGEFYCEAAEWIQDPDGSWYAMTRKRSEGAVVNVQPTDKEFTVRLETEKRLHTVGEPVEFRCILEAQNVPDRYFAVSWAFNSSLIATMGPNAVPVLNSEFAHREARGQLKVAKESDSVFVLKIYHLRQEDSGKYNCRVTEREKTVTGEFIDKESKRPKNIPIIVLPLKSSISVEVASNASVILEGEDLRFSCSVRTAGRPQGRFSVIWQLVDRQNRRSNIMWLDRDGTVQPGSSYWERSSFGGVQMEQVQPNSFSLGIFNSRKEDEGQYECHVTEWVRAVDGEWQIVGERRASTPISITALEMGFAVTAISRTPGVTYSDSFDLQCIIKPHYPAWVPVSVTWRFQPVGTVEFHDLVTFTRDGGVQWGDRSSSFRTRTAIEKAESSNNVRLSISRASDTEAGKYQCVAELWRKNYNNTWTRLAERTSNLLEIRVLQPVTKLQVSKSKRTLTLVENKPIQLNCSVKSQTSQNSHFAVLWYVHKPSDADGKLILKTTHNSAFEYGTYAEEEGLRARLQFERHVSGGLFSLTVQRAEVSDSGSYYCHVEEWLLSPNYAWYKLAEEVSGRTEVTVKQPDSRLRLSQAQGNLSVLETRQVQLECVVLNRTSITSQLMVEWFVWKPNHPERETVARLSRDATFHYGEQAAKNNLKGRLHLESPSPGVYRLFIQNVAVQDSGTYSCHVEEWLPSPSGMWYKRAEDTAGQTALTVMRPDASLQVDTVVPNATVSEKAAFQLDCSIVSRSSQDSRFAVAWYSLRTKAGGKRSSPGLEEQEEEREEEEEEEEDDDDDDPTERTALLSVGPDAVFGPEGSPWEGRLRFQRLSPVLYRLTVLQASPQDTGNYSCHVEEWLPSPQKEWYRLTEEESAPIGIRVLDTSPTLQSIICSNDALFYFVFFYPFPIFGILIITILLVRFKSRNSSKNSDGKNGVPLLWIKEPHLNYSPTCLEPPVLSIHPGAID

SEQ ID NO: 310 - protein, 1023 aa, Artificial Sequence
  ATP1A1
MGKGVGRDKYEPAAVSEQGDKKGKKGKKDRDMDELKKEVSMDDHKLSLDELHRKYGTDLSRGLTSARAAEILARDGPNALTPPPTTPEWIKFCRQLFGGFSMLLWIGAILCFLAYSIQAATEEEPQNDNLYLGVVLSAVVIITGCFSYYQEAKSSKIMESFKNMVPQQALVIRNGEKMSINAEEVVVGDLVEVKGGDRIPADLRIISANGCKVDNSSLTGESEPQTRSPDFTNENPLETRNIAFFSTNCVEGTARGIVVYTGDRTVMGRIATLASGLEGGQTPIAAEIEHFIHIITGVAVFLGVSFFILSLILEYTWLEAVIFLIGIIVANVPEGLLATVTVCLTLTAKRMARKNCLVKNLEAVETLGSTSTICSDKTGTLTQNRMTVAHMWFDNQIHEADTTENQSGVSFDKTSATWLALSRIAGLCNRAVFQANQENLPILKRAVAGDASESALLKCIELCCGSVKEMRERYAKIVEIPFNSTNKYQLSIHKNPNTSEPQHLLVMKGAPERILDRCSSILLHGKEQPLDEELKDAFQNAYLELGGLGERVLGFCHLFLPDEQFPEGFQFDTDDVNFPIDNLCFVGLISMIDPPRAAVPDAVGKCRSAGIKVIMVTGDHPITAKAIAKGVGIISEGNETVEDIAARLNIPVSQVNPRDAKACVVHGSDLKDMTSEQLDDILKYHTEIVFARTSPQQKLIIVEGCQRQGAIVAVTGDGVNDSPALKKADIGVAMGIAGSDVSKQAADMILLDDNFASIVTGVEEGRLIFDNLKKSIAYTLTSNIPEITPFLIFIIANIPLPLGTVTILCIDLGTDMVPAISLAYEQAESDIMKRQPRNPKTDKLVNERLISMAYGQIGMIQALGGFFTYFVILAENGFLPIHLLGLRVDWDDRWINDVEDSYGQQWTYEQRKIVEFTCHTAFFVSIVVVQWADLVICKTRRNSVFQQGMKNKILIFGLFEETALAAFLSYCPGMGVALRMYPLKPTWWFCAFPYSLLIFVYDEVRKLIIRRRPGGWVEKETYY

SEQ ID NO: 311 - protein, 240 aa, Artificial Sequence
  ATP1A2
MGRGAGREYSPAATTAENGGGKKKQKEKELDELKKEVAMDDHKLSLDELGRKYQVDLSKGLTNQRAQDVLARDGPNALTPPPTTPEWVKFCRQLFGGFSILLWIGAILCFLAYGIQAAMEDEPSNDNLYLGVVLAAVVIVTGCFSYYQEAKSSKIMDSFKNMVPQQALVIREGEKMQINAEEVVVGDLVEVKGGDRVPADLRIISSHGCKVDNSSLTGESEPQTRSPEFTHENPLETRNI

SEQ ID NO: 312 - protein, 780 aa, Artificial Sequence
  ATP1A3
CFFSTNCVEGTARGIVIATGDRTVMGRIATLASGLEVGRTPIAMEIEHFIQLITGVAVFLGVSFFVLSLILGYSWLEAVIFLIGIIVANVPEGLLATVTVCLTLTAKRMARKNCLVKNLEAVETLGSTSTICSDKTGTLTQNRMTVAHMWFDNQIHEADTTEDQSGATFDKRSPTWTALSRIAGLCNRAVFKAGQENISVSKRDTAGDASESALLKCIELSCGSVRKMRDRNPKVAEIPFNSTNKYQLSIHEREDSPQSHVLVMKGAPERILDRCSTILVQGKEIPLDKEMQDAFQNAYMELGGLGERVLGFCQLNLPSGKFPRGFKFDTDELNFPTEKLCFVGLMSMIDPPRAAVPDAVGKCRSAGIKVIMVTGDHPITAKAIAKGVGIISEGNETVEDIAARLNIPMSQVNPREAKACVVHGSDLKDMTSEQLDEILKNHTEIVFARTSPQQKLIIVEGCQRQGAIVAVTGDGVNDSPALKKADIGIAMGISGSDVSKQAADMILLDDNFASIVTGVEEGRLIFDNLKKSIAYTLTSNIPEITPFLLFIIANIPLPLGTVTILCIDLGTDMVPAISLAYEAAESDIMKRQPRNSQTDKLVNERLISMAYGQIGMIQALGGFFTYFVILAENGFLPSRLLGIRLDWDDRTMNDLEDSYGQEWTYEQRKVVEFTCHTAFFASIVVVQWADLIICKTRRNSVFQQGMKNKILIFGLLEETALAAFLSYCPGMGVALRMYPLKVTWWFCAFPYSLLIFIYDEVRKLILRRYPGGWVEKETYY

SEQ ID NO: 313 - protein, 1026 aa, Artificial Sequence
  ATP1A4
MGSGGSDSYRIATSQDKKDDKDSPKKNKGKERRDLDDLKKEVAMTEHKMSVEEVCRKYNTDCVQGLTHSKAQEILARDGPNALTPPPTTPEWVKFCRQLFGGFSILLWIGAILCFLAYGIQAGTEDDPSGDNLYLGIVLAAVVIITGCFSYYQEAKSSKIMESFKNMVPQQALVIREGEKMQVNAEEVVVGDLVEIKGGDRVPADLRIISAHGCKVDNSSLTGESEPQTRSPDCTHDNPLETRNITFFSTNCVEGTARGVVVATGDRTVMGRIATLASGLEVGKTPIAIEIEHFIQLITGVAVFLGVSFFILSLILGYTWLEAVIFLIGIIVANVPEGLLATVTVCLTLTAKRMARKNCLVKNLEAVETLGSTSTICSDKTGTLTQNRMTVAHMWFDNQIHEADTTEDQSGTSFDKSSHTWVALSHIAGLCNRAVFKGGQDNIPVLKRDVAGDASESALLKCIELSSGSVKLMRERNKKVAEIPFNSTNKYQLSIHETEDPNDNRYLLVMKGAPERILDRCSTILLQGKEQPLDEEMKEAFQNAYLELGGLGERVLGFCHYYLPEEQFPKGFAFDCDDVNFTTDNLCFVGLMSMIDPPRAAVPDAVGKCRSAGIKVIMVTGDHPITAKAIAKGVGIISEGNETVEDIAARLNIPVSQVNPRDAKACVIHGTDLKDFTSEQIDEILQNHTEIVFARTSPQQKLIIVEGCQRQGAIVAVTGDGVNDSPALKKADIGVAMGIAGSDVSKQAADMILLDDNFASIVTGVEEGRLIFDNLKKSIAYTLTSNIPEITPFLLFIMANIPLPLGTITILCIDLGTDMVPAISLAYEAAESDIMKRQPRNPRTDKLVNERLISMAYGQIGMIQALGGFFSYFVILAENGFLPGNLVGIRLNWDDRTVNDLEDSYGQQWTYEQRKVVEFTCHTAFFVSIVVVQWADLIICKTRRNSVFQQGMKNKILIFGLFEETALAAFLSYCPGMDVALRMYPLKPSWWFCAFPYSFLIFVYDEIRKLILRRNPGGWVEKETYY

SEQ ID NO: 314 - protein, 1029 aa, Artificial Sequence
  ATP1B3
MGLWGKKGTVAPHDQSPRRRPKKGLIKKKMVKREKQKRNMEELKKEVVMDDHKLTLEELSTKYSVDLTKGHSHQRAKEILTRGGPNTVTPPPTTPEWVKFCKQLFGGFSLLLWTGAILCFVAYSIQIYFNEEPTKDNLYLSIVLSVVVIVTGCFSYYQEAKSSKIMESFKNMVPQQALVIRGGEKMQINVQEVVLGDLVEIKGGDRVPADLRLISAQGCKVDNSSLTGESEPQSRSPDFTHENPLETRNICFFSTNCVEGTARGIVIATGDSTVMGRIASLTSGLAVGQTPIAAEIEHFIHLITVVAVFLGVTFFALSLLLGYGWLEAIIFLIGIIVANVPEGLLATVTVCLTLTAKRMARKNCLVKNLEAVETLGSTSTICSDKTGTLTQNRMTVAHMWFDMTVYEADTTEEQTGKTFTKSSDTWFMLARIAGLCNRADFKANQEILPIAKRATTGDASESALLKFIEQSYSSVAEMREKNPKVAEIPFNSTNKYQMSIHLREDSSQTHVLMMKGAPERILEFCSTFLLNGQEYSMNDEMKEAFQNAYLELGGLGERVLGFCFLNLPSSFSKGFPFNTDEINFPMDNLCFVGLISMIDPPRAAVPDAVSKCRSAGIKVIMVTGDHPITAKAIAKGVGIISEGTETAEEVAARLKIPISKVDASAAKAIVVHGAELKDIQSKQLDQILQNHPEIVFARTSPQQKLIIVEGCQRLGAVVAVTGDGVNDSPALKKADIGIAMGISGSDVSKQAADMILLDDNFASIVTGVEEGRLIFDNLKKSIMYTLTSNIPEITPFLMFIILGIPLPLGTITILCIDLGTDMVPAISLAYESAESDIMKRLPRNPKTDNLVNHRLIGMAYGQIGMIQALAGFFTYFVILAENGFRPVDLLGIRLHWEDKYLNDLEDSYGQQWTYEQRKVVEFTCQTAFFVTIVVVQWADLIISKTRRNSLFQQGMRNKVLIFGILEETLLAAFLSYTPGMDVALRMYPLKITWWLCAIPYSILIFVYDEIRKLLIRQHPDGWVERETYY

SEQ ID NO: 315 - protein, 279 aa, Artificial Sequence
  ATP2B1
MTKNEKKSLNQSLAEWKLFIYNPTTGEFLGRTAKSWGLILLFYLVFYGFLAALFSFTMWVMLQTLNDEVPKYRDQIPSPGLMVFPKPVTALEYTFSRSDPTSYAGYIEDLKKFLKPYTLEEQKNLTVCPDGALFEQKGPVYVACQFPISLLQACSGMNDPDFGYSQGNPCILVKMNRIIGLKPEGVPRIDCVSKNEDIPNVAVYPHNGMIDLKYFPYYGKKLHVGYLQPLVAVQVSFAPNNTGKEVTVECKIDGSANLKSQDDRDKFLGRVMFKITARA

SEQ ID NO: 316 - protein, 1258 aa, Artificial Sequence
  ATP2B2
MGDMANNSVAYSGVKNSLKEANHDGDFGITLAELRALMELRSTDALRKIQESYGDVYGICTKLKTSPNEGLSGNPADLERREAVFGKNFIPPKKPKTFLQLVWEALQDVTLIILEIAAIVSLGLSFYQPPEGDNALCGEVSVGEEEGEGETGWIEGAAILLSVVCVVLVTAFNDWSKEKQFRGLQSRIEQEQKFTVIRGGQVIQIPVADITVGDIAQVKYGDLLPADGILIQGNDLKIDESSLTGESDHVKKSLDKDPLLLSGTHVMEGSGRMVVTAVGVNSQTGIIFTLLGAGGEEEEKKDEKKKEKKNKKQDGAIENRNKAKAQDGAAMEMQPLKSEEGGDGDEKDKKKANLPKKEKSVLQGKLTKLAVQIGKAGLLMSAITVIILVLYFVIDTFWVQKRPWLAECTPIYIQYFVKFFIIGVTVLVVAVPEGLPLAVTISLAYSVKKMMKDNNLVRHLDACETMGNATAICSDKTGTLTMNRMTVVQAYINEKHYKKVPEPEAIPPNILSYLVTGISVNCAYTSKILPPEKEGGLPRHVGNKTECALLGLLLDLKRDYQDVRNEIPEEALYKVYTFNSVRKSMSTVLKNSDGSYRIFSKGASEIILKKCFKILSANGEAKVFRPRDRDDIVKTVIEPMASEGLRTICLAFRDFPAGEPEPEWDNENDIVTGLTCIAVVGIEDPVRPEVPDAIKKCQRAGITVRMVTGDNINTARAIATKCGILHPGEDFLCLEGKDFNRRIRNEKGEIEQERIDKIWPKLRVLARSSPTDKHTLVKGIIDSTVSDQRQVVAVTGDGTNDGPALKKADVGFAMGIAGTDVAKEASDIILTDDNFTSIVKAVMWGRNVYDSISKFLQFQLTVNVVAVIVAFTGACITQDSPLKAVQMLWVNLIMDTLASLALATEPPTESLLLRKPYGRNKPLISRTMMKNILGHAFYQLVVVFTLLFAGEKFFDIDSGRNAPLHAPPSEHYTIVFNTFVLMQLFNEINARKIHGERNVFEGIFNNAIFCTIVLGTFVVQIIIVQFGGKPFSCSELSIEQWLWSIFLGMGTLLWGQLISTIPTSRLKFLKEAGHGTQKEEIPEEELAEDVEEIDHAERELRRGQILWFRGLNRIQTQMDVVNAFQSGSSIQGALRRQPSIASQHHDVTNISTPTHIRVVNAFRSSLYEGLEKPESRSSIHNFMTHPEFRIEDSEPHIPLIDDTDAEDDAPTKRNSSPPPSPNKNNNAVDSGIHLTIEMNKSATSSSPGSPLHSLETSL

SEQ ID NO: 317 - protein, 1272 aa, Artificial Sequence
  ATP2B3
MGDMTNSDFYSKNQRNESSHGGEFGCTMEELRSLMELRGTEAVVKIKETYGDTEAICRRLKTSPVEGLPGTAPDLEKRKQIFGQNFIPPKKPKTFLQLVWEALQDVTLIILEIAAIISLGLSFYHPPGEGNEGCATAQGGAEDEGEAEAGWIEGAAILLSVICVVLVTAFNDWSKEKQFRGLQSRIEQEQKFTVVRAGQVVQIPVAEIVVGDIAQVKYGDLLPADGLFIQGNDLKIDESSLTGESDQVRKSVDKDPMLLSGTHVMEGSGRMLVTAVGVNSQTGIIFTLLGAGGEEEEKKDKKGVKKGDGLQLPAADGAAASNAADSANASLVNGKMQDGNVDASQSKAKQQDGAAAMEMQPLKSAEGGDADDRKKASMHKKEKSVLQGKLTKLAVQIGKAGLVMSAITVIILVLYFTVDTFVVNKKPWLPECTPVYVQYFVKFFIIGVTVLVVAVPEGLPLAVTISLAYSVKKMMKDNNLVRHLDACETMGNATAICSDKTGTLTTNRMTVVQAYVGDVHYKEIPDPSSINTKTMELLINAIAINSAYTTKILPPEKEGALPRQVGNKTECGLLGFVLDLKQDYEPVRSQMPEEKLYKVYTFNSVRKSMSTVIKLPDESFRMYSKGASEIVLKKCCKILNGAGEPRVFRPRDRDEMVKKVIEPMACDGLRTICVAYRDFPSSPEPDWDNENDILNELTCICVVGIEDPVRPEVPEAIRKCQRAGITVRMVTGDNINTARAIAIKCGIIHPGEDFLCLEGKEFNRRIRNEKGEIEQERIDKIWPKLRVLARSSPTDKHTLVKGIIDSTHTEQRQVVAVTGDGTNDGPALKKADVGFAMGIAGTDVAKEASDIILTDDNFSSIVKAVMWGRNVYDSISKFLQFQLTVNVVAVIVAFTGACITQDSPLKAVQMLWVNLIMDTFASLALATEPPTETLLLRKPYGRNKPLISRTMMKNILGHAVYQLALIFTLLFVGEKMFQIDSGRNAPLHSPPSEHYTIIFNTFVMMQLFNEINARKIHGERNVFDGIFRNPIFCTIVLGTFAIQIVIVQFGGKPFSCSPLQLDQWMWCIFIGLGELVWGQVIATIPTSRLKFLKEAGRLTQKEEIPEEELNEDVEEIDHAERELRRGQILWFRGLNRIQTQIEVVNTFKSGASFQGALRRQSSVTSQSQDIRVVKAFRSSLYEGLEKPESRTSIHNFMAHPEFRIEDSQPHIPLIDDTDLEEDAALKQNSSPPSSLNKNNSAIDSGINLTTDTSKSATSSSPGSPIHSLETSL

SEQ ID NO: 318 - protein, 874 aa, Artificial Sequence
  ATP2B4
MGDMANSSIEFHPKPQQQRDVPQAGGFGCTLAELRTLMELRGAEALQKIEEAYGDVSGLCRRLKTSPTEGLADNTNDLEKRRQIYGQNFIPPKQPKTFLQLVWEALQDVTLIILEVAAIVSLGLSFYAPPGEESEACGNVSGGAEDEGEAEAGWIEGAAILLSVICVVLVTAFNDWSKEKQFRGLQSRIEQEQKFTVIRNGQLLQVPVAALVVGDIAQVKYGDLLPADGVLIQANDLKIDESSLTGESDHVRKSADKDPMLLSGTHVMEGSGRMVVTAVGVNSQTGIIFTLLGAGGEEEEKKDKKGKQQDGAMESSQTKAKKQDGAVAMEMQPLKSAEGGEMEEREKKKANAPKKEKSVLQGKLTKLAVQIGKAGLVMSAITVIILVLYFVIETFVVEGRTWLAECTPVYVQYFVKFFIIGVTVLVVAVPEGLPLAVTISLAYSVKKMMKDNNLVRHLDACETMGNATAICSDKTGTLTTNRMTVVQSYLGDTHYKEIPAPSALTPKILDLLVHAISINSAYTTKILPPEKEGALPRQVGNKTECALLGFVLDLKRDFQPVREQIPEDKLYKVYTFNSVRKSMSTVIRMPDGGFRLFSKGASEILLKKCTNILNSNGELRGFRPRDRDDMVRKIIEPMACDGLRTICIAYRDFSAGQEPDWDNENEVVGDLTCIAVVGIEDPVRPEVPEAIRKCQRAGITVRMVTGDNINTARAIAAKCGIIQPGEDFLCLEGKEFNRRIRNEKGEIEQERLDKVWPKLRVLARSSPTDKHTLVKGIIDSTTGEQRQVVAVTGDGTNDGPALKKADVGFAMGIAGTDVAKEASDIILTDDNFTSIVKAVMWGRNVYDSISKFLQFQLTVNVVAVIVAFTGACIT

SEQ ID NO: 319 - protein, 731 aa, Artificial Sequence
  PTGFRN Protein Fragment #1
PSARPPPSLSLREGEPFELRCTAASASPLHTHLALLWEVHRGPARRSVLALTHEGRFHPGLGYEQRYHSGDVRLDTVGSDAYRLSVSRALSADQGSYRCIVSEWIAEQGNWQEIQEKAVEVATVVIQPSVLRAAVPKNVSVAEGKELDLTCNITTDRADDVRPEVTWSFSRMPDSTLPGSRVLARLDRDSLVHSSPHVALSHVDARSYHLLVRDVSKENSGYYYCHVSLWAPGHNRSWHKVAEAVSSPAGVGVTWLEPDYQVYLNASKVPGFADDPTELACRVVDTKSGEANVRFTVSWYYRMNRRSDNVVTSELLAVMDGDWTLKYGERSKQRAQDGDFIFSKEHTDTFNFRIQRTTEEDRGNYYCVVSAWTKQRNNSWVKSKDVFSKPVNIFWALEDSVLVVKARQPKPFFAAGNTFEMTCKVSSKNIKSPRYSVLIMAEKPVGDLSSPNETKYIISLDQDSVVKLENWTDASRVDGVVLEKVQEDEFRYRMYQTQVSDAGLYRCMVTAWSPVRGSLWREAATSLSNPIEIDFQTSGPIFNASVHSDTPSVIRGDLIKLFCIITVEGAALDPDDMAFDVSWFAVHSFGLDKAPVLLSSLDRKGIVTTSRRDWKSDLSLERVSVLEFLLQVHGSEDQDFGNYYCSVTPWVKSPTGSWQKEAEIHSKPVFITVKMDVLNAFKYPLLIGVGLSTVIGLLSCLIGYCSSHWCCKKEVQETRRERRRLMSMEMD

SEQ ID NO: 320 - protein, 611 aa, Artificial Sequence
  PTGFRN Protein Fragment #2
VATVVIQPSVLRAAVPKNVSVAEGKELDLTCNITTDRADDVRPEVTWSFSRMPDSTLPGSRVLARLDRDSLVHSSPHVALSHVDARSYHLLVRDVSKENSGYYYCHVSLWAPGHNRSWHKVAEAVSSPAGVGVTWLEPDYQVYLNASKVPGFADDPTELACRVVDTKSGEANVRFTVSWYYRMNRRSDNVVTSELLAVMDGDWTLKYGERSKQRAQDGDFIFSKEHTDTFNFRIQRTTEEDRGNYYCVVSAWTKQRNNSWVKSKDVFSKPVNIFWALEDSVLVVKARQPKPFFAAGNTFEMTCKVSSKNIKSPRYSVLIMAEKPVGDLSSPNETKYIISLDQDSVVKLENWTDASRVDGVVLEKVQEDEFRYRMYQTQVSDAGLYRCMVTAWSPVRGSLWREAATSLSNPIEIDFQTSGPIFNASVHSDTPSVIRGDLIKLFCIITVEGAALDPDDMAFDVSWFAVHSFGLDKAPVLLSSLDRKGIVTTSRRDWKSDLSLERVSVLEFLLQVHGSEDQDFGNYYCSVTPWVKSPTGSWQKEAEIHSKPVFITVKMDVLNAFKYPLLIGVGLSTVIGLLSCLIGYCSSHWCCKKEVQETRRERRRLMSMEMD

SEQ ID NO: 321 - protein, 485 aa, Artificial Sequence
  PTGFRN Protein Fragment #3
SPAGVGVTWLEPDYQVYLNASKVPGFADDPTELACRVVDTKSGEANVRFTVSWYYRMNRRSDNVVTSELLAVMDGDWTLKYGERSKQRAQDGDFIFSKEHTDTFNFRIQRTTEEDRGNYYCVVSAWTKQRNNSWVKSKDVFSKPVNIFWALEDSVLVVKARQPKPFFAAGNTFEMTCKVSSKNIKSPRYSVLIMAEKPVGDLSSPNETKYIISLDQDSVVKLENWTDASRVDGVVLEKVQEDEFRYRMYQTQVSDAGLYRCMVTAWSPVRGSLWREAATSLSNPIEIDFQTSGPIFNASVHSDTPSVIRGDLIKLFCIITVEGAALDPDDMAFDVSWFAVHSFGLDKAPVLLSSLDRKGIVTTSRRDWKSDLSLERVSVLEFLLQVHGSEDQDFGNYYCSVTPWVKSPTGSWQKEAEIHSKPVFITVKMDVLNAFKYPLLIGVGLSTVIGLLSCLIGYCSSHWCCKKEVQETRRERRRLMSMEMD

SEQ ID NO: 322 - protein, 343 aa, Artificial Sequence
  PTGFRN Protein Fragment #4
KPVNIFWALEDSVLVVKARQPKPFFAAGNTFEMTCKVSSKNIKSPRYSVLIMAEKPVGDLSSPNETKYIISLDQDSVVKLENWTDASRVDGVVLEKVQEDEFRYRMYQTQVSDAGLYRCMVTAWSPVRGSLWREAATSLSNPIEIDFQTSGPIFNASVHSDTPSVIRGDLIKLFCIITVEGAALDPDDMAFDVSWFAVHSFGLDKAPVLLSSLDRKGIVTTSRRDWKSDLSLERVSVLEFLLQVHGSEDQDFGNYYCSVTPWVKSPTGSWQKEAEIHSKPVFITVKMDVLNAFKYPLLIGVGLSTVIGLLSCLIGYCSSHWCCKKEVQETRRERRRLMSMEMD

SEQ ID NO: 323 - protein, 217 aa, Artificial Sequence
  PTGFRN Protein Fragment #5
VRGSLWREAATSLSNPIEIDFQTSGPIFNASVHSDTPSVIRGDLIKLFCIITVEGAALDPDDMAFDVSWFAVHSFGLDKAPVLLSSLDRKGIVTTSRRDWKSDLSLERVSVLEFLLQVHGSEDQDFGNYYCSVTPWVKSPTGSWQKEAEIHSKPVFITVKMDVLNAFKYPLLIGVGLSTVIGLLSCLIGYCSSHWCCKKEVQETRRERRRLMSMEMD

SEQ ID NO: 324 - protein, 66 aa, Artificial Sequence
  PTGFRN Protein Fragment #6
SKPVFITVKMDVLNAFKYPLLIGVGLSTVIGLLSCLIGYCSSHWCCKKEVQETRRERRRLMSMEMD

SEQ ID NO: 325 - protein, 21 aa, Artificial Sequence
  PTGFRN Protein - Signal Peptide
MGRLASRPLLLALLSLALCRG

SEQ ID NO: 326 - protein, 247 aa, Artificial Sequence
  BSG Protein Fragment #1
PGTVFTTVEDLGSKILLTCSLNDSATEVTGHRWLKGGVVLKEDALPGQKTEFKVDSDDQWGEYSCVFLPEPMGTANIQLHGPPRVKAVKSSEHINEGETAMLVCKSESVPPVTDWAWYKITDSEDKALMNGSESRFFVSSSQGRSELHIENLNMEADPGQYRCNGTSSKGSDQAIITLRVRSHLAALWPFLGIVAEVLVLVTIIFIYEKRRKPEDVLDDDDAGSAPLKSSGQHQNDKGKNVRQRNSS

SEQ ID NO: 327 - protein, 168 aa, Artificial Sequence
  BSG Protein Fragment #2
HGPPRVKAVKSSEHINEGETAMLVCKSESVPPVTDWAWYKITDSEDKALMNGSESRFFVSSSQGRSELHIENLNMEADPGQYRCNGTSSKGSDQAIITLRVRSHLAALWPFLGIVAEVLVLVTIIFIYEKRRKPEDVLDDDDAGSAPLKSSGQHQNDKGKNVRQRNSS

SEQ ID NO: 328 - protein, 66 aa, Artificial Sequence
  BSG Protein Fragment #3
SHLAALWPFLGIVAEVLVLVTIIFIYEKRRKPEDVLDDDDAGSAPLKSSGQHQNDKGKNVRQRNSS

SEQ ID NO: 329 - protein, 18 aa, Artificial Sequence
  BSG Protein - Signal Peptide
MAAALFVLLGFALLGTHG

SEQ ID NO: 330 - protein, 456 aa, Artificial Sequence
  IGSF8 Protein Fragment #1
APPGPRGRQAPTSPPRMTVHEGQELALGCLARTSTQKHTHLAVSFGRSVPEAPVGRSTLQEVVGIRSDLAVEAGAPYAERLAAGELRLGKEGTDRYRMVVGGAQAGDAGTYHCTAAEWIQDPDGSWAQIAEKRAVLAHVDVQTLSSQLAVTVGPGERRIGPGEPLELLCNVSGALPPAGRHAAYSVGWEMAPAGAPGPGRLVAQLDTEGVGSLGPGYEGRHIAMEKVASRTYRLRLEAARPGDAGTYRCLAKAYVRGSGTRLREAASARSRPLPVHVREEGVVLEAVAWLAGGTVYRGETASLLCNISVRGGPPGLRLAASWWVERPEDGELSSVPAQLVGGVGQDGVAELGVRPGGGPVSVELVGPRSHRLRLHSLGPEDEGVYHCAPSAWVQHADYSWYQAGSARSGPVTVYPYMHALDTLFVPLLVGTGVALVTGATVLGTITCCFMKRLRKR

SEQ ID NO: 331 - protein, 320 aa, Artificial Sequence
  IGSF8 Protein Fragment #2
AHVDVQTLSSQLAVTVGPGERRIGPGEPLELLCNVSGALPPAGRHAAYSVGWEMAPAGAPGPGRLVAQLDTEGVGSLGPGYEGRHIAMEKVASRTYRLRLEAARPGDAGTYRCLAKAYVRGSGTRLREAASARSRPLPVHVREEGVVLEAVAWLAGGTVYRGETASLLCNISVRGGPPGLRLAASWWVERPEDGELSSVPAQLVGGVGQDGVAELGVRPGGGPVSVELVGPRSHRLRLHSLGPEDEGVYHCAPSAWVQHADYSWYQAGSARSGPVTVYPYMHALDTLFVPLLVGTGVALVTGATVLGTITCCFMKRLRKR

SEQ ID NO: 332 - protein, 179 aa, Artificial Sequence
  IGSF8 Protein Fragment #3
REEGVVLEAVAWLAGGTVYRGETASLLCNISVRGGPPGLRLAASWWVERPEDGELSSVPAQLVGGVGQDGVAELGVRPGGGPVSVELVGPRSHRLRLHSLGPEDEGVYHCAPSAWVQHADYSWYQAGSARSGPVTVYPYMHALDTLFVPLLVGTGVALVTGATVLGTITCCFMKRLRKR

SEQ ID NO: 333 - protein, 24 aa, Artificial Sequence
  IGSF8 Protein Fragment #4
VALVTGATVLGTITCCFMKRLRKR

SEQ ID NO: 334 - protein, 27 aa, Artificial Sequence
  IGSF8 Protein - Signal Peptide
MGALRPTLLPPSLPLLLLLMLGMGCWA

SEQ ID NO: 335-400 - skipped (66 entries)

SEQ ID NO: 401 - protein, 332 aa, Artificial Sequence
  The MARCKS protein
MGAQFSKTAAKGEAAAERPGEAAVASSPSKANGQENGHVKVNGDASPAAAESGAKEELQANGSAPAADKEEPAAAGSGAASPSAAEKGEPAAAAAPEAGASPVEKEAPAEGEAAEPGSPTAAEGEAASAASSTSSPKAEDGATPSPSNETPKKKKKRFSFKKSFKLSGFSFKKNKKEAGEGGEAEAPAAEGGKDEAAGGAAAAAAEAGAASGEQAAAPGEEAAAGEEGAAGGDPQEAKPQEAAVAPEKPPASDETKAAEEPSKVEEKKAEEAGASAAACEAPSAAGPGAPPEQEAAPAEEPAAAAASSACAAPSQEAQPECSPEAPPAEAAE

SEQ ID NO: 402 - protein, 195 aa, Artificial Sequence
  The MARCKSL1 protein
MGSQSSKAPRGDVTAEEAAGASPAKANGQENGHVKSNGDLSPKGEGESPPVNGTDEAAGATGDAIEPAPPSQGAEAKGEVPPKETPKKKKKFSFKKPFKLSGLSFKRNRKEGGGDSSASSPTEEEQEQGEIGACSDEGTAQEGKAAATPESQEPQAKGAEASAASEEEAGPQATEPSTPSGPESGPTPASAEQNE

SEQ ID NO: 403 - protein, 227 aa, Artificial Sequence
  The BASP1 protein
MGGKLSKKKKGYNVNDEKAKEKDKKAEGAATEEEGTPKESEPQAAAEPAEAKEGKEKPDQDAEGKAEEKEGEKDAAAAKEEAPKAEPEKTEGAAEAKAEPPKAPEQEQAAPGPAAGGEAPKAAEAAAAPAESAAPAAGEEPSKEEGEPKKTEAPAAPAAQETKSDGAPASDSKPGSSEAAPSSKETPAATEAPSSTPKAQGPAASAEEPKPVEAPAANSDQTVTVKE

SEQ ID NO: 404 - protein, 8 aa, Artificial Sequence
  Synthetic Peptide
  misc_feature (2)..(2): Wherein Xaa can be Alanine or any other Amino Acid
GXKLSKKK

SEQ ID NO: 405 - protein, 4 aa, Artificial Sequence
  Synthetic Peptide
KKKK

SEQ ID NO: 406 - protein, 5 aa, Artificial Sequence
  Synthetic Peptide
KKKKK

SEQ ID NO: 407 - protein, 4 aa, Artificial Sequence
  Synthetic Peptide
RRRR

SEQ ID NO: 408 - protein, 5 aa, Artificial Sequence
  Synthetic Peptide
RRRRR

SEQ ID NO: 409 - protein, 4 aa, Artificial Sequence
  Synthetic Peptide
  misc_feature (1)..(4): Wherein Xaa can be Lys or Arg
XXXX

SEQ ID NO: 410 - protein, 5 aa, Artificial Sequence
  Synthetic Peptide
  misc_feature (1)..(5): Wherein Xaa can be Lys or Arg
XXXXX

SEQ ID NO: 411 - protein, 7 aa, Artificial Sequence
  Synthetic Peptide
GGKLSKK

SEQ ID NO: 412 - protein, 7 aa, Artificial Sequence
  Synthetic Peptide
GAKLSKK

SEQ ID NO: 413 - protein, 7 aa, Artificial Sequence
  Synthetic Peptide
GGKQSKK

SEQ ID NO: 414 - protein, 7 aa, Artificial Sequence
  Synthetic Peptide
GGKLAKK

SEQ ID NO: 415 - protein, 6 aa, Artificial Sequence
  Synthetic Peptide
GGKLSK

SEQ ID NO: 416 - protein, 6 aa, Artificial Sequence
  Synthetic Peptide
GAKLSK

SEQ ID NO: 417 - protein, 6 aa, Artificial Sequence
  Synthetic Peptide
GGKQSK

SEQ ID NO: 418 - protein, 6 aa, Artificial Sequence
  Synthetic Peptide
GGKLAK

SEQ ID NO: 419 - protein, 4 aa, Artificial Sequence
  Synthetic Peptide
KKKG

SEQ ID NO: 420 - protein, 5 aa, Artificial Sequence
  Synthetic Peptide
KKKGY

SEQ ID NO: 421 - protein, 6 aa, Artificial Sequence
  Synthetic Peptide
KKKGYN

SEQ ID NO: 422 - protein, 7 aa, Artificial Sequence
  Synthetic Peptide
KKKGYNV

SEQ ID NO: 423 - protein, 8 aa, Artificial Sequence
  Synthetic Peptide
KKKGYNVN

SEQ ID NO: 424 - protein, 6 aa, Artificial Sequence
  Synthetic Peptide
KKKGYS

SEQ ID NO: 425 - protein, 6 aa, Artificial Sequence
  Synthetic Peptide
KKKGYG

SEQ ID NO: 426 - protein, 7 aa, Artificial Sequence
  Synthetic Peptide
KKKGYGG

SEQ ID NO: 427 - protein, 5 aa, Artificial Sequence
  Synthetic Peptide
KKKGS

SEQ ID NO: 428 - protein, 6 aa, Artificial Sequence
  Synthetic Peptide
KKKGSG

SEQ ID NO: 429 - protein, 7 aa, Artificial Sequence
  Synthetic Peptide
KKKGSGS

SEQ ID NO: 430 - protein, 4 aa, Artificial Sequence
  Synthetic Peptide
KKKS

SEQ ID NO: 431 - protein, 5 aa, Artificial Sequence
  Synthetic Peptide
KKKSG

SEQ ID NO: 432 - protein, 6 aa, Artificial Sequence
  Synthetic Peptide
KKKSGG

SEQ ID NO: 433 - protein, 7 aa, Artificial Sequence
  Synthetic Peptide
KKKSGGS

SEQ ID NO: 434 - protein, 8 aa, Artificial Sequence
  Synthetic Peptide
KKKSGGSG

SEQ ID NO: 435 - protein, 8 aa, Artificial Sequence
  Synthetic Peptide
KKSGGSGG

SEQ ID NO: 436 - protein, 10 aa, Artificial Sequence
  Synthetic Peptide
KKKSGGSGGS

SEQ ID NO: 437 - protein, 8 aa, Artificial Sequence
  Synthetic Peptide
KRFSFKKS

SEQ ID NO: 438 - protein, 8 aa, Artificial Sequence
  Synthetic Peptide
GGKLSKKK

SEQ ID NO: 439 - protein, 8 aa, Artificial Sequence
  Synthetic Peptide
GGKLSKKS

SEQ ID NO: 440 - protein, 8 aa, Artificial Sequence
  Synthetic Peptide
GAKLSKKK

SEQ ID NO: 441 - protein, 8 aa, Artificial Sequence
  Synthetic Peptide
GAKLSKKS

SEQ ID NO: 442 - protein, 8 aa, Artificial Sequence
  Synthetic Peptide
GGKQSKKK

SEQ ID NO: 443 - protein, 8 aa, Artificial Sequence
  Synthetic Peptide
GGKQSKKS

SEQ ID NO: 444 - protein, 8 aa, Artificial Sequence
  Synthetic Peptide
GGKLAKKK

SEQ ID NO: 445 - protein, 8 aa, Artificial Sequence
  Synthetic Peptide
GGKLAKKS

SEQ ID NO: 446 - protein, 14 aa, Artificial Sequence
  Synthetic Peptide
GGKLSKKKKGYNVN

SEQ ID NO: 447 - protein, 14 aa, Artificial Sequence
  Synthetic Peptide
GAKLSKKKKGYNVN

SEQ ID NO: 448 - protein, 14 aa, Artificial Sequence
  Synthetic Peptide
GGKQSKKKKGYNVN

SEQ ID NO: 449 - protein, 14 aa, Artificial Sequence
  Synthetic Peptide
GGKLAKKKKGYNVN

SEQ ID NO: 450 - protein, 14 aa, Artificial Sequence
  Synthetic Peptide
GGKLSKKKKGYSGG

SEQ ID NO: 451 - protein, 14 aa, Artificial Sequence
  Synthetic Peptide
GGKLSKKKKGSGGS

SEQ ID NO: 452 - protein, 14 aa, Artificial Sequence
  Synthetic Peptide
GGKLSKKKKSGGSG

SEQ ID NO: 453 - protein, 14 aa, Artificial Sequence
  Synthetic Peptide
GGKLSKKKSGGSGG

SEQ ID NO: 454 - protein, 14 aa, Artificial Sequence
  Synthetic Peptide
GGKLSKKSGGSGGS

SEQ ID NO: 455 - protein, 14 aa, Artificial Sequence
  Synthetic Peptide
GGKLSKSGGSGGSV

SEQ ID NO: 456 - protein, 14 aa, Artificial Sequence
  Synthetic Peptide
GAKKSKKRFSFKKS

SEQ ID NO: 457 - protein, 29 aa, Artificial Sequence
  Synthetic Peptide
GGKLSKKKKGYNVNDEKAKEKDKKAEGAA

SEQ ID NO: 458 - protein, 28 aa, Artificial Sequence
  Synthetic Peptide
GGKLSKKKKGYNVNDEKAKEKDKKAEGA

SEQ ID NO: 459 - protein, 27 aa, Artificial Sequence
  Synthetic Peptide
GGKLSKKKKGYNVNDEKAKEKDKKAEG

SEQ ID NO: 460 - protein, 26 aa, Artificial Sequence
  Synthetic Peptide
GGKLSKKKKGYNVNDEKAKEKDKKAE

SEQ ID NO: 461 - protein, 25 aa, Artificial Sequence
  Synthetic Peptide
GGKLSKKKKGYNVNDEKAKEKDKKA

SEQ ID NO: 462 - protein, 24 aa, Artificial Sequence
  Synthetic Peptide
GGKLSKKKKGYNVNDEKAKEKDKK

SEQ ID NO: 463 - protein, 23 aa, Artificial Sequence
  Synthetic Peptide
GGKLSKKKKGYNVNDEKAKEKDK

SEQ ID NO: 464 - protein, 22 aa, Artificial Sequence
  Synthetic Peptide
GGKLSKKKKGYNVNDEKAKEKD

SEQ ID NO: 465 - protein, 21 aa, Artificial Sequence
  Synthetic Peptide
GGKLSKKKKGYNVNDEKAKEK

SEQ ID NO: 466 - protein, 20 aa, Artificial Sequence
  Synthetic Peptide
GGKLSKKKKGYNVNDEKAKE

SEQ ID NO: 467 - protein, 19 aa, Artificial Sequence
  Synthetic Peptide
GGKLSKKKKGYNVNDEKAK

SEQ ID NO: 468 - protein, 18 aa, Artificial Sequence
  Synthetic Peptide
GGKLSKKKKGYNVNDEKA

SEQ ID NO: 469 - protein, 17 aa, Artificial Sequence
  Synthetic Peptide
GGKLSKKKKGYNVNDEK

SEQ ID NO: 470 - protein, 16 aa, Artificial Sequence
  Synthetic Peptide
GGKLSKKKKGYNVNDE

SEQ ID NO: 471 - protein, 15 aa, Artificial Sequence
  Synthetic Peptide
GGKLSKKKKGYNVND

SEQ ID NO: 472 - protein, 13 aa, Artificial Sequence
  Synthetic Peptide
GGKLSKKKKGYNV

SEQ ID NO: 473 - protein, 12 aa, Artificial Sequence
  Synthetic Peptide
GGKLSKKKKGYN

SEQ ID NO: 474 - protein, 11 aa, Artificial Sequence
  Synthetic Peptide
GGKLSKKKKGY

SEQ ID NO: 475 - protein, 10 aa, Artificial Sequence
  Synthetic Peptide
GGKLSKKKKG

SEQ ID NO: 476 - protein, 9 aa, Artificial Sequence
  Synthetic Peptide
GGKLSKKKK

SEQ ID NO: 477 - protein, 29 aa, Artificial Sequence
  Synthetic Peptide
GAKKSKKRFSFKKSFKLSGFSFKKNKKEA

SEQ ID NO: 478 - protein, 28 aa, Artificial Sequence
  Synthetic Peptide
GAKKSKKRFSFKKSFKLSGFSFKKNKKE

SEQ ID NO: 479 - protein, 27 aa, Artificial Sequence
  Synthetic Peptide
GAKKSKKRFSFKKSFKLSGFSFKKNKK

SEQ ID NO: 480 - protein, 26 aa, Artificial Sequence
  Synthetic Peptide
GAKKSKKRFSFKKSFKLSGFSFKKNK

SEQ ID NO: 481 - protein, 25 aa, Artificial Sequence
  Synthetic Peptide
GAKKSKKRFSFKKSFKLSGFSFKKN

SEQ ID NO: 482 - protein, 24 aa, Artificial Sequence
  Synthetic Peptide
GAKKSKKRFSFKKSFKLSGFSFKK

SEQ ID NO: 483 - protein, 23 aa, Artificial Sequence
  Synthetic Peptide
GAKKSKKRFSFKKSFKLSGFSFK

SEQ ID NO: 484 - protein, 22 aa, Artificial Sequence
  Synthetic Peptide
GAKKSKKRFSFKKSFKLSGFSF

SEQ ID NO: 485 - protein, 21 aa, Artificial Sequence
  Synthetic Peptide
GAKKSKKRFSFKKSFKLSGFS

SEQ ID NO: 486 - protein, 20 aa, Artificial Sequence
  Synthetic Peptide
GAKKSKKRFSFKKSFKLSGF

SEQ ID NO: 487 - protein, 19 aa, Artificial Sequence
  Synthetic Peptide
GAKKSKKRFSFKKSFKLSG

SEQ ID NO: 488 - protein, 18 aa, Artificial Sequence
  Synthetic Peptide
GAKKSKKRFSFKKSFKLS

SEQ ID NO: 489 - protein, 17 aa, Artificial Sequence
  Synthetic Peptide
GAKKSKKRFSFKKSFKL

SEQ ID NO: 490 - protein, 16 aa, Artificial Sequence
  Synthetic Peptide
GAKKSKKRFSFKKSFK

SEQ ID NO: 491 - protein, 15 aa, Artificial Sequence
  Synthetic Peptide
GAKKSKKRFSFKKSF

SEQ ID NO: 492 - protein, 13 aa, Artificial Sequence
  Synthetic Peptide
GAKKSKKRFSFKK

SEQ ID NO: 493 - protein, 12 aa, Artificial Sequence
  Synthetic Peptide
GAKKSKKRFSFK

SEQ ID NO: 494 - protein, 11 aa, Artificial Sequence
  Synthetic Peptide
GAKKSKKRFSF

SEQ ID NO: 495 - protein, 10 aa, Artificial Sequence
  Synthetic Peptide
GAKKSKKRFS

SEQ ID NO: 496 - protein, 9 aa, Artificial Sequence
  Synthetic Peptide
GAKKSKKRF

SEQ ID NO: 497 - protein, 8 aa, Artificial Sequence
  Synthetic Peptide
GAKKSKKR

SEQ ID NO: 498 - protein, 7 aa, Artificial Sequence
  Synthetic Peptide
GAKKSKK

SEQ ID NO: 499 - protein, 29 aa, Artificial Sequence
  Synthetic Peptide
GAKKAKKRFSFKKSFKLSGFSFKKNKKEA

SEQ ID NO: 500 - protein, 28 aa, Artificial Sequence
  Synthetic Peptide
GAKKAKKRFSFKKSFKLSGFSFKKNKKE

SEQ ID NO: 501 - protein, 27 aa, Artificial Sequence
  Synthetic Peptide
GAKKAKKRFSFKKSFKLSGFSFKKNKK

SEQ ID NO: 502 - protein, 26 aa, Artificial Sequence
  Synthetic Peptide
GAKKAKKRFSFKKSFKLSGFSFKKNK

SEQ ID NO: 503 - protein, 25 aa, Artificial Sequence
  Synthetic Peptide
GAKKAKKRFSFKKSFKLSGFSFKKN

SEQ ID NO: 504 - protein, 24 aa, Artificial Sequence
  Synthetic Peptide
GAKKAKKRFSFKKSFKLSGFSFKK

SEQ ID NO: 505 - protein, 23 aa, Artificial Sequence
  Synthetic Peptide
GAKKAKKRFSFKKSFKLSGFSFK

SEQ ID NO: 506 - protein, 22 aa, Artificial Sequence
  Synthetic Peptide
GAKKAKKRFSFKKSFKLSGFSF

SEQ ID NO: 507 - protein, 21 aa, Artificial Sequence
  Synthetic Peptide
GAKKAKKRFSFKKSFKLSGFS

SEQ ID NO: 508 - protein, 20 aa, Artificial Sequence
  Synthetic Peptide
GAKKAKKRFSFKKSFKLSGF

SEQ ID NO: 509 - protein, 19 aa, Artificial Sequence
  Synthetic Peptide
GAKKAKKRFSFKKSFKLSG

SEQ ID NO: 510 - protein, 18 aa, Artificial Sequence
  Synthetic Peptide
GAKKAKKRFSFKKSFKLS

SEQ ID NO: 511 - protein, 17 aa, Artificial Sequence
  Synthetic Peptide
GAKKAKKRFSFKKSFKL

SEQ ID NO: 512 - protein, 16 aa, Artificial Sequence
  Synthetic Peptide
GAKKAKKRFSFKKSFK

SEQ ID NO: 513 - protein, 15 aa, Artificial Sequence
  Synthetic Peptide
GAKKAKKRFSFKKSF

SEQ ID NO: 514 - protein, 14 aa, Artificial Sequence
  Synthetic Peptide
GAKKAKKRFSFKKS

SEQ ID NO: 515 - protein, 13 aa, Artificial Sequence
  Synthetic Peptide
GAKKAKKRFSFKK

SEQ ID NO: 516 - protein, 12 aa, Artificial Sequence
  Synthetic Peptide
GAKKAKKRFSFK

SEQ ID NO: 517 - protein, 11 aa, Artificial Sequence
  Synthetic Peptide
GAKKAKKRFSF

SEQ ID NO: 518 - protein, 10 aa, Artificial Sequence
  Synthetic Peptide
GAKKAKKRFS

SEQ ID NO: 519 - protein, 9 aa, Artificial Sequence
  Synthetic Peptide
GAKKAKKRF

SEQ ID NO: 520 - protein, 8 aa, Artificial Sequence
  Synthetic Peptide
GAKKAKKR

SEQ ID NO: 521 - protein, 7 aa, Artificial Sequence
  Synthetic Peptide
GAKKAKK

SEQ ID NO: 522 - protein, 28 aa, Artificial Sequence
  Synthetic Peptide
GAQESKKKKKKRFSFKKSFKLSGFSFKK

SEQ ID NO: 523 - protein, 27 aa, Artificial Sequence
  Synthetic Peptide
GAQESKKKKKKRFSFKKSFKLSGFSFK

SEQ ID NO: 524 - protein, 26 aa, Artificial Sequence
  Synthetic Peptide
GAQESKKKKKKRFSFKKSFKLSGFSF

SEQ ID NO: 525 - protein, 25 aa, Artificial Sequence
  Synthetic Peptide
GAQESKKKKKKRFSFKKSFKLSGFS

SEQ ID NO: 526 - protein, 24 aa, Artificial Sequence
  Synthetic Peptide
GAQESKKKKKKRFSFKKSFKLSGF

SEQ ID NO: 527 - protein, 23 aa, Artificial Sequence
  Synthetic Peptide
GAQESKKKKKKRFSFKKSFKLSG

SEQ ID NO: 528 - protein, 22 aa, Artificial Sequence
  Synthetic Peptide
GAQESKKKKKKRFSFKKSFKLS

SEQ ID NO: 529 - protein, 21 aa, Artificial Sequence
  Synthetic Peptide
GAQESKKKKKKRFSFKKSFKL

SEQ ID NO: 530 - protein, 20 aa, Artificial Sequence
  Synthetic Peptide
GAQESKKKKKKRFSFKKSFK

SEQ ID NO: 531 - protein, 19 aa, Artificial Sequence
  Synthetic Peptide
GAQESKKKKKKRFSFKKSF

SEQ ID NO: 532 - protein, 18 aa, Artificial Sequence
  Synthetic Peptide
GAQESKKKKKKRFSFKKS

SEQ ID NO: 533 - protein, 17 aa, Artificial Sequence
  Synthetic Peptide
GAQESKKKKKKRFSFKK

SEQ ID NO: 534 - protein, 16 aa, Artificial Sequence
  Synthetic Peptide
GAQESKKKKKKRFSFK

SEQ ID NO: 535 - protein, 15 aa, Artificial Sequence
  Synthetic Peptide
GAQESKKKKKKRFSF

SEQ ID NO: 536 - protein, 14 aa, Artificial Sequence
  Synthetic Peptide
GAQESKKKKKKRFS

SEQ ID NO: 537 - protein, 13 aa, Artificial Sequence
  Synthetic Peptide
GAQESKKKKKKRF

SEQ ID NO: 538 - protein, 12 aa, Artificial Sequence
  Synthetic Peptide
GAQESKKKKKKR

SEQ ID NO: 539 - protein, 11 aa, Artificial Sequence
  Synthetic Peptide
GAQESKKKKKK

SEQ ID NO: 540 - protein, 10 aa, Artificial Sequence
  Synthetic Peptide
GAQESKKKKK

SEQ ID NO: 541 - protein, 9 aa, Artificial Sequence
  Synthetic Peptide
GAQESKKKK

SEQ ID NO: 542 - protein, 8 aa, Artificial Sequence
  Synthetic Peptide
GAQESKKK

SEQ ID NO: 543 - protein, 7 aa, Artificial Sequence
  Synthetic Peptide
GAQESKK

SEQ ID NO: 544 - protein, 30 aa, Artificial Sequence
  Synthetic Peptide
GSQSSKKKKKKFSFKKPFKLSGLSFKRNRK

SEQ ID NO: 545 - protein, 29 aa, Artificial Sequence
  Synthetic Peptide
GSQSSKKKKKKFSFKKPFKLSGLSFKRNR

SEQ ID NO: 546 - protein, 28 aa, Artificial Sequence
  Synthetic Peptide
GSQSSKKKKKKFSFKKPFKLSGLSFKRN

SEQ ID NO: 547 - protein, 27 aa, Artificial Sequence
  Synthetic Peptide
GSQSSKKKKKKFSFKKPFKLSGLSFKR

SEQ ID NO: 548 - protein, 26 aa, Artificial Sequence
  Synthetic Peptide
GSQSSKKKKKKFSFKKPFKLSGLSFK

SEQ ID NO: 549 - protein, 25 aa, Artificial Sequence
  Synthetic Peptide
GSQSSKKKKKKFSFKKPFKLSGLSF

SEQ ID NO: 550 - protein, 24 aa, Artificial Sequence
  Synthetic Peptide
GSQSSKKKKKKFSFKKPFKLSGLS

SEQ ID NO: 551 - protein, 23 aa, Artificial Sequence
  Synthetic Peptide
GSQSSKKKKKKFSFKKPFKLSGL

SEQ ID NO: 552 - protein, 22 aa, Artificial Sequence
  Synthetic Peptide
GSQSSKKKKKKFSFKKPFKLSG

SEQ ID NO: 553 - protein, 21 aa, Artificial Sequence
  Synthetic Peptide
GSQSSKKKKKKFSFKKPFKLS

SEQ ID NO: 554 - protein, 20 aa, Artificial Sequence
  Synthetic Peptide
GSQSSKKKKKKFSFKKPFKL

SEQ ID NO: 555 - protein, 19 aa, Artificial Sequence
  Synthetic Peptide
GSQSSKKKKKKFSFKKPFK

SEQ ID NO: 556 - protein, 18 aa, Artificial Sequence
  Synthetic Peptide
GSQSSKKKKKKFSFKKPF

SEQ ID NO: 557 - protein, 17 aa, Artificial Sequence
  Synthetic Peptide
GSQSSKKKKKKFSFKKP

SEQ ID NO: 558 - protein, 16 aa, Artificial Sequence
  Synthetic Peptide
GSQSSKKKKKKFSFKK

SEQ ID NO: 559 - protein, 15 aa, Artificial Sequence
  Synthetic Peptide
GSQSSKKKKKKFSFK

SEQ ID NO: 560 - protein, 14 aa, Artificial Sequence
  Synthetic Peptide
GSQSSKKKKKKFSF

SEQ ID NO: 561 - protein, 13 aa, Artificial Sequence
  Synthetic Peptide
GSQSSKKKKKKFS

SEQ ID NO: 562 - protein, 12 aa, Artificial Sequence
  Synthetic Peptide
GSQSSKKKKKKF

SEQ ID NO: 563 - protein, 11 aa, Artificial Sequence
  Synthetic Peptide
GSQSSKKKKKK

SEQ ID NO: 564 - protein, 10 aa, Artificial Sequence
  Synthetic Peptide
GSQSSKKKKK

SEQ ID NO: 565 - protein, 9 aa, Artificial Sequence
  Synthetic Peptide
GSQSSKKKK

SEQ ID NO: 566 - protein, 8 aa, Artificial Sequence
  Synthetic Peptide
GSQSSKKK

SEQ ID NO: 567 - protein, 7 aa, Artificial Sequence
  Synthetic Peptide
GSQSSKK

SEQ ID NO: 568-597 - skipped (30 entries)

SEQ ID NO: 598 - protein, 4 aa, Artificial Sequence
  GGGG motif
GGGG

SEQ ID NO: 599 - protein, 25 aa, Artificial Sequence
  KRAS Variant
QYRLKKISKEEKTPGCVKIKKCIIM

SEQ ID NO: 600 - protein, 24 aa, Artificial Sequence
  KRAS Variant
KHKEKMSKDGKKKKKKSKTKCVIM

SEQ ID NO: 601 - DNA, 15 bp, Artificial Sequence
  Antisense Oligonucleotide
ctggtgacgagggtt

SEQ ID NO: 602 - DNA, 15 bp, Artificial Sequence
  Antisense Oligonucleotide
cgctcacaccgcttg

SEQ ID NO: 603 - DNA, 15 bp, Artificial Sequence
  Antisense Oligonucleotide
aggctagtaacgtac

SEQ ID NO: 604 - DNA, 15 bp, Artificial Sequence
  Antisense Oligonucleotide
gaaggctagtaacgt

SEQ ID NO: 605 - DNA, 15 bp, Artificial Sequence
  Antisense Oligonucleotide
ggttccgtcgggctc

SEQ ID NO: 606 - DNA, 15 bp, Artificial Sequence
  Antisense Oligonucleotide
aggttccgtcgggct

SEQ ID NO: 607 - DNA, 15 bp, Artificial Sequence
  Antisense Oligonucleotide
aaggttccgtcgggc

SEQ ID NO: 608 - DNA, 15 bp, Artificial Sequence
  Antisense Oligonucleotide
aaaggttccgtcggg

SEQ ID NO: 609 - DNA, 15 bp, Artificial Sequence
  Antisense Oligonucleotide
gaaaggttccgtcgg

SEQ ID NO: 610 - DNA, 15 bp, Artificial Sequence
  Antisense Oligonucleotide
agaaaggttccgtcg

SEQ ID NO: 611 - DNA, 15 bp, Artificial Sequence
  Antisense Oligonucleotide
agtcgctgaagcgga

SEQ ID NO: 612 - DNA, 15 bp, Artificial Sequence
  Antisense Oligonucleotide
gagtcgctgaagcgg

SEQ ID NO: 613 - DNA, 15 bp, Artificial Sequence
  Antisense Oligonucleotide
cggattcggtccccc

SEQ ID NO: 614 - DNA, 15 bp, Artificial Sequence
  Antisense Oligonucleotide
ccggattcggtcccc

SEQ ID NO: 615 - DNA, 15 bp, Artificial Sequence
  Antisense Oligonucleotide
cccggattcggtccc

SEQ ID NO: 616 - DNA, 15 bp, Artificial Sequence
  Antisense Oligonucleotide
tcccggattcggtcc

SEQ ID NO: 617 - DNA, 15 bp, Artificial Sequence
  Antisense Oligonucleotide
gatcccggattcggt

SEQ ID NO: 618 - DNA, 15 bp, Artificial Sequence
  Antisense Oligonucleotide
agatcccggattcgg

SEQ ID NO: 619 - DNA, 15 bp, Artificial Sequence
  Antisense Oligonucleotide
aagatcccggattcg

SEQ ID NO: 620 - DNA, 15 bp, Artificial Sequence
  Antisense Oligonucleotide
tgatacggggggatg

SEQ ID NO: 621 - DNA, 15 bp, Artificial Sequence
  Antisense Oligonucleotide
cgtgtgcgcgctgca

SEQ ID NO: 622 - DNA, 16 bp, Artificial Sequence
  Antisense Oligonucleotide
actggtgacgagggtt

SEQ ID NO: 623 - DNA, 16 bp, Artificial Sequence
  Antisense Oligonucleotide
aactggtgacgagggt

SEQ ID NO: 624 - DNA, 16 bp, Artificial Sequence
  Antisense Oligonucleotide
ctcacaccgcttgatc

SEQ ID NO: 625 - DNA, 16 bp, Artificial Sequence
  Antisense Oligonucleotide
cggtcagaccagtagc

SEQ ID NO: 626 - DNA, 16 bp, Artificial Sequence
  Antisense Oligonucleotide
ctagtaacgtactgtt

SEQ ID NO: 627 - DNA, 16 bp, Artificial Sequence
  Antisense Oligonucleotide
gctagtaacgtactgt

SEQ ID NO: 628 - DNA, 16 bp, Artificial Sequence
  Antisense Oligonucleotide
ggctagtaacgtactg

SEQ ID NO: 629 - DNA, 16 bp, Artificial Sequence
  Antisense Oligonucleotide
aggctagtaacgtact

SEQ ID NO: 630 - DNA, 16 bp, Artificial Sequence
  Antisense Oligonucleotide
aaggctagtaacgtac

SEQ ID NO: 631 - DNA, 16 bp, Artificial Sequence
  Antisense Oligonucleotide
aagaaggctagtaacg

SEQ ID NO: 632 - DNA, 16 bp, Artificial Sequence
  Antisense Oligonucleotide
aaaggttccgtcgggc

SEQ ID NO: 633 - DNA, 16 bp, Artificial Sequence
  Antisense Oligonucleotide
agaaaggttccgtcgg

SEQ ID NO: 634 - DNA, 16 bp, Artificial Sequence
  Antisense Oligonucleotide
ttcggtcccccagtga

SEQ ID NO: 635 - DNA, 16 bp, Artificial Sequence
  Antisense Oligonucleotide
cggattcggtccccca

SEQ ID NO: 636 - DNA, 16 bp, Artificial Sequence
  Antisense Oligonucleotide
agatcccggattcggt

SEQ ID NO: 637 - DNA, 16 bp, Artificial Sequence
  Antisense Oligonucleotide
agcaagatcccggatt

SEQ ID NO: 638 - DNA, 16 bp, Artificial Sequence
  Antisense Oligonucleotide
tgatacggggggatgg

SEQ ID NO: 639 - DNA, 16 bp, Artificial Sequence
  Antisense Oligonucleotide
ttgatacggggggatg

SEQ ID NO: 640 - DNA, 16 bp, Artificial Sequence
  Antisense Oligonucleotide
agaggccttgatacgg

SEQ ID NO: 641 - DNA, 16 bp, Artificial Sequence
  Antisense Oligonucleotide
gggttagcatatgtca

SEQ ID NO: 642 - DNA, 17 bp, Artificial Sequence
  Antisense Oligonucleotide
tggatctcccctactcg

SEQ ID NO: 643 - DNA, 17 bp, Artificial Sequence
  Antisense Oligonucleotide
actggtgacgagggttc

SEQ ID NO: 644 - DNA, 17 bp, Artificial Sequence
  Antisense Oligonucleotide
gctcacaccgcttgatc

SEQ ID NO: 645 - DNA, 17 bp, Artificial Sequence
  Antisense Oligonucleotide
cgctcacaccgcttgat

SEQ ID NO: 646 - DNA, 17 bp, Artificial Sequence
  Antisense Oligonucleotide
tccgctcacaccgcttg

SEQ ID NO: 647 - DNA, 17 bp, Artificial Sequence
  Antisense Oligonucleotide
ttccgctcacaccgctt

SEQ ID NO: 648 - DNA, 17 bp, Artificial Sequence
  Antisense Oligonucleotide
accagtagctccggaga

SEQ ID NO: 649 - DNA, 17 bp, Artificial Sequence
  Antisense Oligonucleotide
gccggtcagaccagtag

SEQ ID NO: 650 - DNA, 17 bp, Artificial Sequence
  Antisense Oligonucleotide
agccggtcagaccagta

SEQ ID NO: 651 - DNA, 17 bp, Artificial Sequence
  Antisense Oligonucleotide
agaaggctagtaacgta

SEQ ID NO: 652 - DNA, 17 bp, Artificial Sequence
  Antisense Oligonucleotide
aaggttccgtcgggctc

SEQ ID NO: 653 - DNA, 17 bp, Artificial Sequence
  Antisense Oligonucleotide
aaaggttccgtcgggct

SEQ ID NO: 654 - DNA, 17 bp, Artificial Sequence
  Antisense Oligonucleotide
gaaaggttccgtcgggc

SEQ ID NO: 655 - DNA, 17 bp, Artificial Sequence
  Antisense Oligonucleotide
ctgagtcgctgaagcgg

SEQ ID NO: 656 - DNA, 17 bp, Artificial Sequence
  Antisense Oligonucleotide
tctgagtcgctgaagcg

SEQ ID NO: 657 - DNA, 17 bp, Artificial Sequence
  Antisense Oligonucleotide
atcccggattcggtccc

SEQ ID NO: 658 - DNA, 17 bp, Artificial Sequence
  Antisense Oligonucleotide
gatcccggattcggtcc

SEQ ID NO: 659 - DNA, 17 bp, Artificial Sequence
  Antisense Oligonucleotide
agatcccggattcggtc

SEQ ID NO: 660 - DNA, 17 bp, Artificial Sequence
  Antisense Oligonucleotide
aagatcccggattcggt

SEQ ID NO: 661 - DNA, 17 bp, Artificial Sequence
  Antisense Oligonucleotide
gcaagatcccggattcg

SEQ ID NO: 662 - DNA, 17 bp, Artificial Sequence
  Antisense Oligonucleotide
cggtcatcttgatggta

SEQ ID NO: 663 - DNA, 17 bp, Artificial Sequence
  Antisense Oligonucleotide
tgatacggggggatgga

SEQ ID NO: 664 - DNA, 17 bp, Artificial Sequence
  Antisense Oligonucleotide
ttgatacggggggatgg

SEQ ID NO: 665 - DNA, 17 bp, Artificial Sequence
  Antisense Oligonucleotide
cttgatacggggggatg

SEQ ID NO: 666 - DNA, 17 bp, Artificial Sequence
  Antisense Oligonucleotide
gaggccttgatacgggg

SEQ ID NO: 667 - DNA, 20 bp, Artificial Sequence
  Antisense Oligonucleotide
gggggtccctctgatatatg

SEQ ID NO: 668 - DNA, 20 bp, Artificial Sequence
  Antisense Oligonucleotide
gtggatctcccctactcggt

SEQ ID NO: 669 - DNA, 20 bp, Artificial Sequence
  Antisense Oligonucleotide
agcccaacaggaatcgaact

SEQ ID NO: 670 - DNA, 20 bp, Artificial Sequence
  Antisense Oligonucleotide
cgctcacaccgcttgatctt

SEQ ID NO: 671 - DNA, 20 bp, Artificial Sequence
  Antisense Oligonucleotide
ccgctcacaccgcttgatct

SEQ ID NO: 672 - DNA, 20 bp, Artificial Sequence
  Antisense Oligonucleotide
tccgctcacaccgcttgatc

SEQ ID NO: 673 - DNA, 20 bp, Artificial Sequence
  Antisense Oligonucleotide
agtttgccggggccaagtgt

SEQ ID NO: 674 - DNA, 20 bp, Artificial Sequence
  Antisense Oligonucleotide
aagggcacgcggtccatctc

SEQ ID NO: 675 - DNA, 20 bp, Artificial Sequence
  Antisense Oligonucleotide
aaagggcacgcggtccatct

SEQ ID NO: 676 - DNA, 20 bp, Artificial Sequence
  Antisense Oligonucleotide
caaagggcacgcggtccatc

SEQ ID NO: 677 - DNA, 20 bp, Artificial Sequence
  Antisense Oligonucleotide
acaaagggcacgcggtccat

SEQ ID NO: 678 - DNA, 20 bp, Artificial Sequence
  Antisense Oligonucleotide
ccggagacagcgtttggtga

SEQ ID NO: 679 - DNA, 20 bp, Artificial Sequence
  Antisense Oligonucleotide
tccggagacagcgtttggtg

SEQ ID NO: 680 - DNA, 20 bp, Artificial Sequence
  Antisense Oligonucleotide
agtagctccggagacagcgt

SEQ ID NO: 681 - DNA, 20 bp, Artificial Sequence
  Antisense Oligonucleotide
cggtcagaccagtagctccg

SEQ ID NO: 682 - DNA, 20 bp, Artificial Sequence
  Antisense Oligonucleotide
agccggtcagaccagtagct

SEQ ID NO: 683 - DNA, 20 bp, Artificial Sequence
  Antisense Oligonucleotide
cagccggtcagaccagtagc

SEQ ID NO: 684 - DNA, 20 bp, Artificial Sequence
  Antisense Oligonucleotide
gctagtaacgtactgtttgc

SEQ ID NO: 685 - DNA, 20 bp, Artificial Sequence
  Antisense Oligonucleotide
aagaaggctagtaacgtact

SEQ ID NO: 686 - DNA, 20 bp, Artificial Sequence
  Antisense Oligonucleotide
gaagaaggctagtaacgtac

SEQ ID NO: 687 - DNA, 20 bp, Artificial Sequence
  Antisense Oligonucleotide
agaagaaggctagtaacgta

SEQ ID NO: 688 - DNA, 20 bp, Artificial Sequence
  Antisense Oligonucleotide
gagaaaggttccgtcgggct

SEQ ID NO: 689 - DNA, 20 bp, Artificial Sequence
  Antisense Oligonucleotide
ggagaaaggttccgtcgggc

SEQ ID NO: 690 - DNA, 20 bp, Artificial Sequence
  Antisense Oligonucleotide
cggattcggtcccccagtga

SEQ ID NO: 691 - DNA, 20 bp, Artificial Sequence
  Antisense Oligonucleotide
ccggattcggtcccccagtg

SEQ ID NO: 692 - DNA, 20 bp, Artificial Sequence
  Antisense Oligonucleotide
atcccggattcggtccccca

SEQ ID NO: 693 - DNA, 20 bp, Artificial Sequence
  Antisense Oligonucleotide
agatcccggattcggtcccc

SEQ ID NO: 694 - DNA, 20 bp, Artificial Sequence
  Antisense Oligonucleotide
aagatcccggattcggtccc

SEQ ID NO: 695 - DNA, 20 bp, Artificial Sequence
  Antisense Oligonucleotide
gcaagatcccggattcggtc

SEQ ID NO: 696 - DNA, 20 bp, Artificial Sequence
  Antisense Oligonucleotide
tgagcaagatcccggattcg

SEQ ID NO: 697 - DNA, 20 bp, Artificial Sequence
  Antisense Oligonucleotide
tgatacggggggatggagtg

SEQ ID NO: 698 - DNA, 20 bp, Artificial Sequence
  Antisense Oligonucleotide
ttgatacggggggatggagt

SEQ ID NO: 699 - DNA, 20 bp, Artificial Sequence
  Antisense Oligonucleotide
gggagaggccttgatacggg

SEQ ID NO: 700 - DNA, 20 bp, Artificial Sequence
  Antisense Oligonucleotide
gatcaccaactggggttggc

SEQ ID NO: 701 - DNA, 20 bp, Artificial Sequence
  Antisense Oligonucleotide
tgcgtgtgcgcgctgcaggt

SEQ ID NO: 702 - DNA, 20 bp, Artificial Sequence
  Antisense Oligonucleotide
gtgcgtgtgcgcgctgcagg

SEQ ID NO: 703 - DNA, 20 bp, Artificial Sequence
  Antisense Oligonucleotide
gcccttgtacttttgcatag

SEQ ID NO: 704 - DNA, 15 bp, Artificial Sequence
  Antisense Oligonucleotide
agtccgcctcgtagt

SEQ ID NO: 705 - DNA, 15 bp, Artificial Sequence
  Antisense Oligonucleotide
ttgccgccgtacgca

SEQ ID NO: 706 - DNA, 15 bp, Artificial Sequence
  Antisense Oligonucleotide
cgccttgccgccgta

SEQ ID NO: 707 - DNA, 15 bp, Artificial Sequence
  Antisense Oligonucleotide
gctcgtggtcgccga

SEQ ID NO: 708 - DNA, 15 bp, Artificial Sequence
  Antisense Oligonucleotide
cgtagtcgtcggaga

SEQ ID NO: 709 - DNA, 15 bp, Artificial Sequence
  Antisense Oligonucleotide
ccgtagtcgtcggag

SEQ ID NO: 710 - DNA, 15 bp, Artificial Sequence
  Antisense Oligonucleotide
cccgtagtcgtcgga

SEQ ID NO: 711 - DNA, 15 bp, Artificial Sequence
  Antisense Oligonucleotide
ccccgtagtcgtcgg

SEQ ID NO: 712 - DNA, 15 bp, Artificial Sequence
  Antisense Oligonucleotide
cccccgtagtcgtcg

SEQ ID NO: 713 - DNA, 15 bp, Artificial Sequence
  Antisense Oligonucleotide
gccgtactcggccgg

SEQ ID NO: 714 - DNA, 15 bp, Artificial Sequence
  Antisense Oligonucleotide
tagccgtactcggcc

SEQ ID NO: 715 - DNA, 15 bp, Artificial Sequence
  Antisense Oligonucleotide
acgtagccgtactcg

SEQ ID NO: 716 - DNA, 15 bp, Artificial Sequence
  Antisense Oligonucleotide
tcacgtagccgtact

SEQ ID NO: 717 - DNA, 15 bp, Artificial Sequence
  Antisense Oligonucleotide
agtccgcgggctcga

SEQ ID NO: 718 - DNA, 15 bp, Artificial Sequence
  Antisense Oligonucleotide
gcgcgtacgggaagc

SEQ ID NO: 719 - DNA, 15 bp, Artificial Sequence
  Antisense Oligonucleotide
agcgcgcagcgcgta

SEQ ID NO: 720 - DNA, 15 bp, Artificial Sequence
  Antisense Oligonucleotide
aagcgcgcagcgcgt

SEQ ID NO: 721 - DNA, 15 bp, Artificial Sequence
  Antisense Oligonucleotide
taagcgcgcagcgcg

SEQ ID NO: 722 - DNA, 15 bp, Artificial Sequence
  Antisense Oligonucleotide
cgaggtaagcgcgca

SEQ ID NO: 723 - DNA, 15 bp, Artificial Sequence
  Antisense Oligonucleotide
cgccggatcttgtac

SEQ ID NO: 724 - DNA, 15 bp, Artificial Sequence
  Antisense Oligonucleotide
tcgcgccggatcttg

SEQ ID NO: 725 - DNA, 15 bp, Artificial Sequence
  Antisense Oligonucleotide
ctcgcgccggatctt

SEQ ID NO: 726 - DNA, 15 bp, Artificial Sequence
  Antisense Oligonucleotide
tcgcgcgacagctgc

SEQ ID NO: 727 - DNA, 15 bp, Artificial Sequence
  Antisense Oligonucleotide
gctcgcgcgacagct

SEQ ID NO: 728 - DNA, 16 bp, Artificial Sequence
  Antisense Oligonucleotide
agtccgcctcgtagta

SEQ ID NO: 729 - DNA, 16 bp, Artificial Sequence
  Antisense Oligonucleotide
cagtccgcctcgtagt

SEQ ID NO: 730 - DNA, 16 bp, Artificial Sequence
  Antisense Oligonucleotide
tgccgccgtacgcagc

SEQ ID NO: 731 - DNA, 16 bp, Artificial Sequence
  Antisense Oligonucleotide
ttgccgccgtacgcag

SEQ ID NO: 732 - DNA, 16 bp, Artificial Sequence
  Antisense Oligonucleotide
cttgccgccgtacgca

SEQ ID NO: 733 - DNA, 16 bp, Artificial Sequence
  Antisense Oligonucleotide
cgccttgccgccgtac

SEQ ID NO: 734 - DNA, 16 bp, Artificial Sequence
  Antisense Oligonucleotide
cgtggtcgccgatgct

SEQ ID NO: 735 - DNA, 16 bp, Artificial Sequence
  Antisense Oligonucleotide
tcgtggtcgccgatgc

SEQ ID NO: 736 - DNA, 16 bp, Artificial Sequence
  Antisense Oligonucleotide
cgctcgtggtcgccga

SEQ ID NO: 737 - DNA, 16 bp, Artificial Sequence
  Antisense Oligonucleotide
cccccgtagtcgtcgg

SEQ ID NO: 738 - DNA, 16 bp, Artificial Sequence
  Antisense Oligonucleotide
acgtagccgtactcgg

SEQ ID NO: 739 - DNA, 16 bp, Artificial Sequence
  Antisense Oligonucleotide
ggctcacgtagccgta

SEQ ID NO: 740 - DNA, 16 bp, Artificial Sequence
  Antisense Oligonucleotide
agtccgcgggctcgaa

SEQ ID NO: 741 - DNA, 16 bp, Artificial Sequence
  Antisense Oligonucleotide
cagtccgcgggctcga

SEQ ID NO: 742 - DNA, 16 bp, Artificial Sequence
  Antisense Oligonucleotide
ttccgcttgcagtccg

SEQ ID NO: 743 - DNA, 16 bp, Artificial Sequence
  Antisense Oligonucleotide
acgggaagcccgccgc

SEQ ID NO: 744 - DNA, 16 bp, Artificial Sequence
  Antisense Oligonucleotide
tacgggaagcccgccg

SEQ ID NO: 745 - DNA, 16 bp, Artificial Sequence
  Antisense Oligonucleotide
aagcgcgcagcgcgta

SEQ ID NO: 746 - DNA, 16 bp, Artificial Sequence
  Antisense Oligonucleotide
taagcgcgcagcgcgt

SEQ ID NO: 747 - DNA, 16 bp, Artificial Sequence
  Antisense Oligonucleotide
gtaagcgcgcagcgcg

SEQ ID NO: 748 - DNA, 16 bp, Artificial Sequence
  Antisense Oligonucleotide
accgcctggtagccga

SEQ ID NO: 749 - DNA, 16 bp, Artificial Sequence
  Antisense Oligonucleotide
tcggcaccgcctggta

SEQ ID NO: 750 - DNA, 16 bp, Artificial Sequence
  Antisense Oligonucleotide
cgtcgctgtgcttgtc

SEQ ID NO: 751 - DNA, 16 bp, Artificial Sequence
  Antisense Oligonucleotide
cgccggatcttgtact

SEQ ID NO: 752 - DNA, 16 bp, Artificial Sequence
  Antisense Oligonucleotide
tcgcgccggatcttgt

SEQ ID NO: 753 - DNA, 16 bp, Artificial Sequence
  Antisense Oligonucleotide
gctcgcgccggatctt

SEQ ID NO: 754 - DNA, 17 bp, Artificial Sequence
  Antisense Oligonucleotide
cagtccgcctcgtagta

SEQ ID NO: 755 - DNA, 17 bp, Artificial Sequence
  Antisense Oligonucleotide
cttgccgccgtacgcag

SEQ ID NO: 756 - DNA, 17 bp, Artificial Sequence
  Antisense Oligonucleotide
ccttgccgccgtacgca

SEQ ID NO: 757 - DNA, 17 bp, Artificial Sequence
  Antisense Oligonucleotide
cgccttgccgccgtacg

SEQ ID NO: 758 - DNA, 17 bp, Artificial Sequence
  Antisense Oligonucleotide
cgctcgtggtcgccgat

SEQ ID NO: 759 - DNA, 17 bp, Artificial Sequence
  Antisense Oligonucleotide
gcgctcgtggtcgccga

SEQ ID NO: 760 - DNA, 17 bp, Artificial Sequence
  Antisense Oligonucleotide
ccgtagtcgtcggagaa

SEQ ID NO: 761 - DNA, 17 bp, Artificial Sequence
  Antisense Oligonucleotide
cccccgtagtcgtcgga

SEQ ID NO: 762 - DNA, 17 bp, Artificial Sequence
  Antisense Oligonucleotide
tgcccccgtagtcgtcg

SEQ ID NO: 763 - DNA, 17 bp, Artificial Sequence
  Antisense Oligonucleotide
acgtagccgtactcggc

SEQ ID NO: 764 - DNA, 17 bp, Artificial Sequence
  Antisense Oligonucleotide
cacgtagccgtactcgg

SEQ ID NO: 765 - DNA, 17 bp, Artificial Sequence
  Antisense Oligonucleotide
ggctcacgtagccgtac

SEQ ID NO: 766 - DNA, 17 bp, Artificial Sequence
  Antisense Oligonucleotide
gtacgggaagcccgccg

SEQ ID NO: 767 - DNA, 17 bp, Artificial Sequence
  Antisense Oligonucleotide
cgcgtacgggaagcccg

SEQ ID NO: 768 - DNA, 17 bp, Artificial Sequence
  Antisense Oligonucleotide
agcgcgcagcgcgtacg

SEQ ID NO: 769 - DNA, 17 bp, Artificial Sequence
  Antisense Oligonucleotide
aagcgcgcagcgcgtac

SEQ ID NO: 770 - DNA, 17 bp, Artificial Sequence
  Antisense Oligonucleotide
taagcgcgcagcgcgta

SEQ ID NO: 771 - DNA, 17 bp, Artificial Sequence
  Antisense Oligonucleotide
gtaagcgcgcagcgcgt

SEQ ID NO: 772 - DNA, 17 bp, Artificial Sequence
  Antisense Oligonucleotide
cggatcttgtactcgtc

SEQ ID NO: 773 - DNA, 17 bp, Artificial Sequence
  Antisense Oligonucleotide
cgcgccggatcttgtac

SEQ ID NO: 774 - DNA, 17 bp, Artificial Sequence
  Antisense Oligonucleotide
tcgcgccggatcttgta

SEQ ID NO: 775 - DNA, 17 bp, Artificial Sequence
  Antisense Oligonucleotide
ctcgcgccggatcttgt

SEQ ID NO: 776 - DNA, 17 bp, Artificial Sequence
  Antisense Oligonucleotide
cgctcgcgccggatctt

SEQ ID NO: 777 - DNA, 17 bp, Artificial Sequence
  Antisense Oligonucleotide
ttgcgctcgcgccggat

SEQ ID NO: 778 - DNA, 20 bp, Artificial Sequence
  Antisense Oligonucleotide
cgccttgccgccgtacgcag

SEQ ID NO: 779 - DNA, 20 bp, Artificial Sequence
  Antisense Oligonucleotide
ccgccttgccgccgtacgca

SEQ ID NO: 780 - DNA, 20 bp, Artificial Sequence
  Antisense Oligonucleotide
ttgcccccgtagtcgtcgga

SEQ ID NO: 781 - DNA, 20 bp, Artificial Sequence
  Antisense Oligonucleotide
taagcgcgcagcgcgtacgg

SEQ ID NO: 782 - DNA, 20 bp, Artificial Sequence
  Antisense Oligonucleotide
gtaagcgcgcagcgcgtacg

SEQ ID NO: 783 - DNA, 20 bp, Artificial Sequence
  Antisense Oligonucleotide
aggtaagcgcgcagcgcgta

SEQ ID NO: 784 - DNA, 20 bp, Artificial Sequence
  Antisense Oligonucleotide
cgcgccggatcttgtactcg

SEQ ID NO: 785 - DNA, 20 bp, Artificial Sequence
  Antisense Oligonucleotide
gcgctcgcgccggatcttgt

SEQ ID NO: 786 - DNA, 20 bp, Artificial Sequence
  Antisense Oligonucleotide
gcgctcgtggtcgccgatgc

SEQ ID NO: 787 - DNA, 20 bp, Artificial Sequence
  Antisense Oligonucleotide
tagccgtactcggccggctt

SEQ ID NO: 788 - DNA, 20 bp, Artificial Sequence
  Antisense Oligonucleotide
gtagccgtactcggccggct

SEQ ID NO: 789 - DNA, 20 bp, Artificial Sequence
  Antisense Oligonucleotide
cgtagccgtactcggccggc

SEQ ID NO: 790 - DNA, 20 bp, Artificial Sequence
  Antisense Oligonucleotide
ggtaagcgcgcagcgcgtac

SEQ ID NO: 791 - DNA, 20 bp, Artificial Sequence
  Antisense Oligonucleotide
tagccgaggtaagcgcgcag

SEQ ID NO: 792 - DNA, 20 bp, Artificial Sequence
  Antisense Oligonucleotide
gtagccgaggtaagcgcgca

SEQ ID NO: 793 - DNA, 20 bp, Artificial Sequence
  Antisense Oligonucleotide
cggatcttgtactcgtcgct

SEQ ID NO: 794 - DNA, 20 bp, Artificial Sequence
  Antisense Oligonucleotide
ttgcgctcgcgccggatctt

SEQ ID NO: 795 - DNA, 20 bp, Artificial Sequence
  Antisense Oligonucleotide
gttgcgctcgcgccggatct

SEQ ID NO: 796 - DNA, 20 bp, Artificial Sequence
  Antisense Oligonucleotide
cgctcgtggtcgccgatgct

SEQ ID NO: 797 - DNA, 20 bp, Artificial Sequence
  Antisense Oligonucleotide
gcgcgctcgtggtcgccgat

SEQ ID NO: 798 - DNA, 20 bp, Artificial Sequence
  Antisense Oligonucleotide
acgtagccgtactcggccgg

SEQ ID NO: 799 - DNA, 20 bp, Artificial Sequence
  Antisense Oligonucleotide
gcgccggatcttgtactcgt

SEQ ID NO: 800 - DNA, 20 bp, Artificial Sequence
  Antisense Oligonucleotide
tcgcgccggatcttgtactc

SEQ ID NO: 801 - DNA, 20 bp, Artificial Sequence
  Antisense Oligonucleotide
gctcgcgccggatcttgtac

SEQ ID NO: 802 - DNA, 20 bp, Artificial Sequence
  Antisense Oligonucleotide
cgcgctcgtggtcgccgatg

SEQ ID NO: 803 - DNA, 20 bp, Artificial Sequence
  Antisense Oligonucleotide
aagcgcgcagcgcgtacggg

SEQ ID NO: 804 - DNA, 20 bp, Artificial Sequence
  Antisense Oligonucleotide
ccggatcttgtactcgtcgc

SEQ ID NO: 805 - DNA, 20 bp, Artificial Sequence
  Antisense Oligonucleotide
ctcgcgccggatcttgtact

SEQ ID NO: 806 - DNA, 20 bp, Artificial Sequence
  Antisense Oligonucleotide
cgctcgcgccggatcttgta

SEQ ID NO: 807 - DNA, 14 bp, Artificial Sequence
  Antisense Oligonucleotide
tcagctccaactac

SEQ ID NO: 808 - DNA, 14 bp, Artificial Sequence
  Antisense Oligonucleotide
atcagctccaacta

SEQ ID NO: 809 - DNA, 14 bp, Artificial Sequence
  Antisense Oligonucleotide
catcagctccaact

SEQ ID NO: 810 - DNA, 14 bp, Artificial Sequence
  Antisense Oligonucleotide
ccatcagctccaac

SEQ ID NO: 811 - DNA, 14 bp, Artificial Sequence
  Antisense Oligonucleotide
gccatcagctccaa

SEQ ID NO: 812 - DNA, 14 bp, Artificial Sequence
  Antisense Oligonucleotide
cgccatcagctcca

SEQ ID NO: 813 - DNA, 14 bp, Artificial Sequence
  Antisense Oligonucleotide
acgccatcagctcc

SEQ ID NO: 814 - DNA, 14 bp, Artificial Sequence
  Antisense Oligonucleotide
tacgccatcagctc

SEQ ID NO: 815 - DNA, 14 bp, Artificial Sequence
  Antisense Oligonucleotide
ctacgccatcagct

SEQ ID NO: 816 - DNA, 14 bp, Artificial Sequence
  Antisense Oligonucleotide
cctacgccatcagc

SEQ ID NO: 817 - DNA, 14 bp, Artificial Sequence
  Antisense Oligonucleotide
gcctacgccatcag

SEQ ID NO: 818 - DNA, 14 bp, Artificial Sequence
  Antisense Oligonucleotide
tgcctacgccatca

SEQ ID NO: 819 - DNA, 14 bp, Artificial Sequence
  Antisense Oligonucleotide
ttgcctacgccatc

SEQ ID NO: 820 - DNA, 14 bp, Artificial Sequence
  Antisense Oligonucleotide
cttgcctacgccat

SEQ ID NO: 821 - DNA, 15 bp, Artificial Sequence
  Antisense Oligonucleotide
tcagctccaactacc

SEQ ID NO: 822 - DNA, 15 bp, Artificial Sequence
  Antisense Oligonucleotide
atcagctccaactac

SEQ ID NO: 823 - DNA, 15 bp, Artificial Sequence
  Antisense Oligonucleotide
catcagctccaacta

SEQ ID NO: 824 - DNA, 15 bp, Artificial Sequence
  Antisense Oligonucleotide
ccatcagctccaact

SEQ ID NO: 825 - DNA, 15 bp, Artificial Sequence
  Antisense Oligonucleotide
gccatcagctccaac

SEQ ID NO: 826 - DNA, 15 bp, Artificial Sequence
  Antisense Oligonucleotide
cgccatcagctccaa

SEQ ID NO: 827 - DNA, 15 bp, Artificial Sequence
  Antisense Oligonucleotide
acgccatcagctcca

SEQ ID NO: 828 - DNA, 15 bp, Artificial Sequence
  Antisense Oligonucleotide
tacgccatcagctcc

SEQ ID NO: 829 - DNA, 15 bp, Artificial Sequence
  Antisense Oligonucleotide
ctacgccatcagctc

SEQ ID NO: 830 - DNA, 15 bp, Artificial Sequence
  Antisense Oligonucleotide
cctacgccatcagct

SEQ ID NO: 831 - DNA, 15 bp, Artificial Sequence
  Antisense Oligonucleotide
gcctacgccatcagc

SEQ ID NO: 832 - DNA, 15 bp, Artificial Sequence
  Antisense Oligonucleotide
tgcctacgccatcag

SEQ ID NO: 833 - DNA, 15 bp, Artificial Sequence
  Antisense Oligonucleotide
ttgcctacgccatca

SEQ ID NO: 834 - DNA, 15 bp, Artificial Sequence
  Antisense Oligonucleotide
cttgcctacgccatc

SEQ ID NO: 835 - DNA, 15 bp, Artificial Sequence
  Antisense Oligonucleotide
tcttgcctacgccat

SEQ ID NO: 836 - DNA, 16 bp, Artificial Sequence
  Antisense Oligonucleotide
tcagctccaactacca

SEQ ID NO: 837 - DNA, 16 bp, Artificial Sequence
  Antisense Oligonucleotide
atcagctccaactacc

SEQ ID NO: 838 - DNA, 16 bp, Artificial Sequence
  Antisense Oligonucleotide
catcagctccaactac

SEQ ID NO: 839 - DNA, 16 bp, Artificial Sequence
  Antisense Oligonucleotide
ccatcagctccaacta

SEQ ID NO: 840 - DNA, 16 bp, Artificial Sequence
  Antisense Oligonucleotide
gccatcagctccaact

SEQ ID NO: 841 - DNA, 16 bp, Artificial Sequence
  Antisense Oligonucleotide
cgccatcagctccaac

SEQ ID NO: 842 - DNA, 16 bp, Artificial Sequence
  Antisense Oligonucleotide
acgccatcagctccaa

SEQ ID NO: 843 - DNA, 16 bp, Artificial Sequence
  Antisense Oligonucleotide
tacgccatcagctcca

SEQ ID NO: 844 - DNA, 16 bp, Artificial Sequence
  Antisense Oligonucleotide
ctacgccatcagctcc

SEQ ID NO: 845 - DNA, 16 bp, Artificial Sequence
  Antisense Oligonucleotide
cctacgccatcagctc

SEQ ID NO: 846 - DNA, 16 bp, Artificial Sequence
  Antisense Oligonucleotide
gcctacgccatcagct

SEQ ID NO: 847 - DNA, 16 bp, Artificial Sequence
  Antisense Oligonucleotide
tgcctacgccatcagc

SEQ ID NO: 848 - DNA, 16 bp, Artificial Sequence
  Antisense Oligonucleotide
ttgcctacgccatcag

SEQ ID NO: 849 - DNA, 16 bp, Artificial Sequence
  Antisense Oligonucleotide
cttgcctacgccatca

SEQ ID NO: 850 - DNA, 16 bp, Artificial Sequence
  Antisense Oligonucleotide
tcttgcctacgccatc

SEQ ID NO: 851 - DNA, 16 bp, Artificial Sequence
  Antisense Oligonucleotide
ctcttgcctacgccat

SEQ ID NO: 852 - DNA, 17 bp, Artificial Sequence
  Antisense Oligonucleotide
tcagctccaactaccac

SEQ ID NO: 853 - DNA, 17 bp, Artificial Sequence
  Antisense Oligonucleotide
atcagctccaactacca

SEQ ID NO: 854 - DNA, 17 bp, Artificial Sequence
  Antisense Oligonucleotide
catcagctccaactacc

SEQ ID NO: 855 - DNA, 17 bp, Artificial Sequence
  Antisense Oligonucleotide
ccatcagctccaactac

SEQ ID NO: 856 - DNA, 17 bp, Artificial Sequence
  Antisense Oligonucleotide
gccatcagctccaacta

SEQ ID NO: 857 - DNA, 17 bp, Artificial Sequence
  Antisense Oligonucleotide
cgccatcagctccaact

SEQ ID NO: 858 - DNA, 17 bp, Artificial Sequence
  Antisense Oligonucleotide
acgccatcagctccaac

SEQ ID NO: 859 - DNA, 17 bp, Artificial Sequence
  Antisense Oligonucleotide
tacgccatcagctccaa

SEQ ID NO: 860 - DNA, 17 bp, Artificial Sequence
  Antisense Oligonucleotide
ctacgccatcagctcca

SEQ ID NO: 861 - DNA, 17 bp, Artificial Sequence
  Antisense Oligonucleotide
cctacgccatcagctcc

SEQ ID NO: 862 - DNA, 17 bp, Artificial Sequence
  Antisense Oligonucleotide
gcctacgccatcagctc

SEQ ID NO: 863 - DNA, 17 bp, Artificial Sequence
  Antisense Oligonucleotide
tgcctacgccatcagct

SEQ ID NO: 864 - DNA, 17 bp, Artificial Sequence
  Antisense Oligonucleotide
ttgcctacgccatcagc

SEQ ID NO: 865 - DNA, 17 bp, Artificial Sequence
  Antisense Oligonucleotide
cttgcctacgccatcag

SEQ ID NO: 866 - DNA, 17 bp, Artificial Sequence
  Antisense Oligonucleotide
tcttgcctacgccatca

SEQ ID NO: 867 - DNA, 17 bp, Artificial Sequence
  Antisense Oligonucleotide
ctcttgcctacgccatc

SEQ ID NO: 868 - DNA, 17 bp, Artificial Sequence
  Antisense Oligonucleotide
actcttgcctacgccat

SEQ ID NO: 869 - DNA, 20 bp, Artificial Sequence
  Antisense Oligonucleotide
tcagctccaactaccacaag

SEQ ID NO: 870 - DNA, 20 bp, Artificial Sequence
  Antisense Oligonucleotide
atcagctccaactaccacaa

SEQ ID NO: 871 - DNA, 20 bp, Artificial Sequence
  Antisense Oligonucleotide
catcagctccaactaccaca

SEQ ID NO: 872 - DNA, 20 bp, Artificial Sequence
  Antisense Oligonucleotide
ccatcagctccaactaccac

SEQ ID NO: 873 - DNA, 20 bp, Artificial Sequence
  Antisense Oligonucleotide
gccatcagctccaactacca

SEQ ID NO: 874 - DNA, 20 bp, Artificial Sequence
  Antisense Oligonucleotide
cgccatcagctccaactacc

SEQ ID NO: 875 - DNA, 20 bp, Artificial Sequence
  Antisense Oligonucleotide
acgccatcagctccaactac

SEQ ID NO: 876 - DNA, 20 bp, Artificial Sequence
  Antisense Oligonucleotide
tacgccatcagctccaacta

SEQ ID NO: 877 - DNA, 20 bp, Artificial Sequence
  Antisense Oligonucleotide
ctacgccatcagctccaact

SEQ ID NO: 878 - DNA, 20 bp, Artificial Sequence
  Antisense Oligonucleotide
cctacgccatcagctccaac

SEQ ID NO: 879 - DNA, 20 bp, Artificial Sequence
  Antisense Oligonucleotide
gcctacgccatcagctccaa

SEQ ID NO: 880 - DNA, 20 bp, Artificial Sequence
  Antisense Oligonucleotide
tgcctacgccatcagctcca

SEQ ID NO: 881 - DNA, 20 bp, Artificial Sequence
  Antisense Oligonucleotide
ttgcctacgccatcagctcc

SEQ ID NO: 882 - DNA, 20 bp, Artificial Sequence
  Antisense Oligonucleotide
cttgcctacgccatcagctc

SEQ ID NO: 883 - DNA, 20 bp, Artificial Sequence
  Antisense Oligonucleotide
tcttgcctacgccatcagct

SEQ ID NO: 884 - DNA, 20 bp, Artificial Sequence
  Antisense Oligonucleotide
ctcttgcctacgccatcagc

SEQ ID NO: 885 - DNA, 20 bp, Artificial Sequence
  Antisense Oligonucleotide
actcttgcctacgccatcag

SEQ ID NO: 886 - DNA, 20 bp, Artificial Sequence
  Antisense Oligonucleotide
cactcttgcctacgccatca

SEQ ID NO: 887 - DNA, 20 bp, Artificial Sequence
  Antisense Oligonucleotide
gcactcttgcctacgccatc

SEQ ID NO: 888 - DNA, 20 bp, Artificial Sequence
  Antisense Oligonucleotide
ggcactcttgcctacgccat

SEQ ID NO: 889 - DNA, 17 bp, Artificial Sequence
  Antisense Oligonucleotide
ggtaggcgcctcagtcg

SEQ ID NO: 890 - DNA, 20 bp, Artificial Sequence
  Antisense Oligonucleotide
ggtaggcgcctcagtcgtat

SEQ ID NO: 891 - DNA, 20 bp, Artificial Sequence
  Antisense Oligonucleotide
aggtaggcgcctcagtcgta

SEQ ID NO: 892 - DNA, 15 bp, Artificial Sequence
  Antisense Oligonucleotide
atttgttgacgggtc

SEQ ID NO: 893 - DNA, 20 bp, Artificial Sequence
  Antisense Oligonucleotide
gattctttgctggccgcata

SEQ ID NO: 894 - DNA, 20 bp, Artificial Sequence
  Antisense Oligonucleotide
cgtagattgtgctgatagag

SEQ ID NO: 895 - DNA, 17 bp, Artificial Sequence
  Antisense Oligonucleotide
gtaggcgcctcagtcgt

SEQ ID NO: 896 - DNA, 20 bp, Artificial Sequence
  Antisense Oligonucleotide
caggtaggcgcctcagtcgt

SEQ ID NO: 897 - DNA, 20 bp, Artificial Sequence
  Antisense Oligonucleotide
cgccagctcactcacgatgc

SEQ ID NO: 898 - DNA, 16 bp, Artificial Sequence
  Antisense Oligonucleotide
cgtactccatcgctga

SEQ ID NO: 899 - DNA, 20 bp, Artificial Sequence
  Antisense Oligonucleotide
tagtcagctgctcgatgctc

SEQ ID NO: 900 - DNA, 16 bp, Artificial Sequence
  Antisense Oligonucleotide
taggcgcctcagtcgt

SEQ ID NO: 901 - DNA, 16 bp, Artificial Sequence
  Antisense Oligonucleotide
cacaattggctcggcc

SEQ ID NO: 902 - DNA, 20 bp, Artificial Sequence
  Antisense Oligonucleotide
cacgtactccatcgctgaca

SEQ ID NO: 903 - DNA, 20 bp, Artificial Sequence
  Antisense Oligonucleotide
cgacaatactttccgaatgc

SEQ ID NO: 904 - DNA, 15 bp, Artificial Sequence
  Antisense Oligonucleotide
cgacaatactttccg

SEQ ID NO: 905 - DNA, 20 bp, Artificial Sequence
  Antisense Oligonucleotide
aagcggctatactgctggtc

SEQ ID NO: 906 - DNA, 17 bp, Artificial Sequence
  Antisense Oligonucleotide
gccgacaatactttccg

SEQ ID NO: 907 - DNA, 15 bp, Artificial Sequence
  Antisense Oligonucleotide
acgtactccatcgct

SEQ ID NO: 908 - DNA, 20 bp, Artificial Sequence
  Antisense Oligonucleotide
gtaggcgcctcagtcgtatc

SEQ ID NO: 909 - DNA, 20 bp, Artificial Sequence
  Antisense Oligonucleotide
aggcaccgggccacaatccg

SEQ ID NO: 910 - DNA, 20 bp, Artificial Sequence
  Antisense Oligonucleotide
cgatgctcagtcctcgcttg

SEQ ID NO: 911 - DNA, 16 bp, Artificial Sequence
  Antisense Oligonucleotide
atcggccggtgctgta

SEQ ID NO: 912 - DNA, 17 bp, Artificial Sequence
  Antisense Oligonucleotide
taggcgcctcagtcgta

SEQ ID NO: 913 - DNA, 20 bp, Artificial Sequence
  Antisense Oligonucleotide
agttttctagccgatctagg

SEQ ID NO: 914 - DNA, 20 bp, Artificial Sequence
  Antisense Oligonucleotide
ccgacaatactttccgaatg

SEQ ID NO: 915 - DNA, 20 bp, Artificial Sequence
  Antisense Oligonucleotide
aatccgggcaatctccattg

SEQ ID NO: 916 - DNA, 16 bp, Artificial Sequence
  Antisense Oligonucleotide
cgggcaatctccattg

SEQ ID NO: 917 - DNA, 20 bp, Artificial Sequence
  Antisense Oligonucleotide
taatttgttgacgggtctga

SEQ ID NO: 918 - DNA, 20 bp, Artificial Sequence
  Antisense Oligonucleotide
tgtagtcagctgctcgatgc

SEQ ID NO: 919 - DNA, 20 bp, Artificial Sequence
  Antisense Oligonucleotide
tgattcttcgtagattgtgc

SEQ ID NO: 920 - DNA, 17 bp, Artificial Sequence
  Antisense Oligonucleotide
acgtactccatcgctga

SEQ ID NO: 921 - DNA, 20 bp, Artificial Sequence
  Antisense Oligonucleotide
gtagtcagctgctcgatgct

SEQ ID NO: 922 - DNA, 20 bp, Artificial Sequence
  Antisense Oligonucleotide
tggctctctggccgacaata

SEQ ID NO: 923 - DNA, 20 bp, Artificial Sequence
  Antisense Oligonucleotide
ttgttgacgggtctgaagtt

SEQ ID NO: 924 - DNA, 20 bp, Artificial Sequence
  Antisense Oligonucleotide
tagtgaactggacgccggtc

SEQ ID NO: 925 - DNA, 20 bp, Artificial Sequence
  Antisense Oligonucleotide
gtagtgaactggacgccggt

SEQ ID NO: 926 - DNA, 20 bp, Artificial Sequence
  Antisense Oligonucleotide
gccacaatccgggcaatctc

SEQ ID NO: 927 - DNA, 16 bp, Artificial Sequence
  Antisense Oligonucleotide
gaactggacgccggtc

SEQ ID NO: 928 - DNA, 20 bp, Artificial Sequence
  Antisense Oligonucleotide
gacgggtctgaagttgagat

SEQ ID NO: 929 - DNA, 15 bp, Artificial Sequence
  Antisense Oligonucleotide
gaactggacgccggt

SEQ ID NO: 930 - DNA, 17 bp, Artificial Sequence
  Antisense Oligonucleotide
atcggccggtgctgtac

SEQ ID NO: 931 - DNA, 20 bp, Artificial Sequence
  Antisense Oligonucleotide
aagcatcacaattggctcgg

SEQ ID NO: 932 - DNA, 15 bp, Artificial Sequence
  Antisense Oligonucleotide
gcgcctcagtcgtat

SEQ ID NO: 933 - DNA, 20 bp, Artificial Sequence
  Antisense Oligonucleotide
gcttgattcttcgtagattg

SEQ ID NO: 934 - DNA, 20 bp, Artificial Sequence
  Antisense Oligonucleotide
ggctctctggccgacaatac

SEQ ID NO: 935 - DNA, 20 bp, Artificial Sequence
  Antisense Oligonucleotide
cagtgtagtcagctgctcga

SEQ ID NO: 936 - DNA, 20 bp, Artificial Sequence
  Antisense Oligonucleotide
acgtactccatcgctgacaa

SEQ ID NO: 937 - DNA, 20 bp, Artificial Sequence
  Antisense Oligonucleotide
atccgggcaatctccattgg

SEQ ID NO: 938 - DNA, 20 bp, Artificial Sequence
  Antisense Oligonucleotide
ggttccacggactggatctg

SEQ ID NO: 939 - DNA, 20 bp, Artificial Sequence
  Antisense Oligonucleotide
gcatcacaattggctcggcc

SEQ ID NO: 940 - DNA, 20 bp, Artificial Sequence
  Antisense Oligonucleotide
gccgatctaggcagatgttg

SEQ ID NO: 941 - DNA, 20 bp, Artificial Sequence
  Antisense Oligonucleotide
gcacgtactccatcgctgac

SEQ ID NO: 942 - DNA, 15 bp, Artificial Sequence
  Antisense Oligonucleotide
actggacgccggtct

SEQ ID NO: 943 - DNA, 20 bp, Artificial Sequence
  Antisense Oligonucleotide
catcggccggtgctgtacaa

SEQ ID NO: 944 - DNA, 16 bp, Artificial Sequence
  Antisense Oligonucleotide
actggacgccggtctt

SEQ ID NO: 945 - DNA, 15 bp, Artificial Sequence
  Antisense Oligonucleotide
ggcgcctcagtcgta

SEQ ID NO: 946 - DNA, 20 bp, Artificial Sequence
  Antisense Oligonucleotide
gccgacaatactttccgaat

SEQ ID NO: 947 - DNA, 15 bp, Artificial Sequence
  Antisense Oligonucleotide
ggacgccggtcttga

SEQ ID NO: 948 - DNA, 17 bp, Artificial Sequence
  Antisense Oligonucleotide
tagtgaactggacgccg

SEQ ID NO: 949 - DNA, 20 bp, Artificial Sequence
  Antisense Oligonucleotide
ggcaccgggccacaatccgg

SEQ ID NO: 950 - DNA, 20 bp, Artificial Sequence
  Antisense Oligonucleotide
cgtactccatcgctgacaaa

SEQ ID NO: 951 - DNA, 17 bp, Artificial Sequence
  Antisense Oligonucleotide
catcggccggtgctgta

SEQ ID NO: 952 - DNA, 20 bp, Artificial Sequence
  Antisense Oligonucleotide
cggccggtgctgtacaatgg

SEQ ID NO: 953 - DNA, 20 bp, Artificial Sequence
  Antisense Oligonucleotide
gcggctatactgctggtcaa

SEQ ID NO: 954 - DNA, 20 bp, Artificial Sequence
  Antisense Oligonucleotide
atgttaaatttccgggatcc

SEQ ID NO: 955 - DNA, 15 bp, Artificial Sequence
  Antisense Oligonucleotide
cgccggtcttgatga

SEQ ID NO: 956 - DNA, 20 bp, Artificial Sequence
  Antisense Oligonucleotide
ctggccgacaatactttccg

SEQ ID NO: 957 - DNA, 15 bp, Artificial Sequence
  Antisense Oligonucleotide
aactggacgccggtc

SEQ ID NO: 958 - DNA, 16 bp, Artificial Sequence
  Antisense Oligonucleotide
aactggacgccggtct

SEQ ID NO: 959 - DNA, 20 bp, Artificial Sequence
  Antisense Oligonucleotide
caccgggccacaatccgggc

SEQ ID NO: 960 - DNA, 20 bp, Artificial Sequence
  Antisense Oligonucleotide
tggccgacaatactttccga

SEQ ID NO: 961 - DNA, 20 bp, Artificial Sequence
  Antisense Oligonucleotide
gtgctcaagatggcccgctc

SEQ ID NO: 962 - DNA, 20 bp, Artificial Sequence
  Antisense Oligonucleotide
tcgctgacaaaagccccgcc

SEQ ID NO: 963 - DNA, 20 bp, Artificial Sequence
  Antisense Oligonucleotide
acaatccgggcaatctccat

SEQ ID NO: 964 - DNA, 20 bp, Artificial Sequence
  Antisense Oligonucleotide
ggccggtgctgtacaatggg

SEQ ID NO: 965 - DNA, 15 bp, Artificial Sequence
  Antisense Oligonucleotide
tggacgccggtcttg

SEQ ID NO: 966 - DNA, 20 bp, Artificial Sequence
  Antisense Oligonucleotide
atcgctgacaaaagccccgc

SEQ ID NO: 967 - DNA, 20 bp, Artificial Sequence
  Antisense Oligonucleotide
gcatcggccggtgctgtaca

SEQ ID NO: 968 - DNA, 20 bp, Artificial Sequence
  Antisense Oligonucleotide
accgggccacaatccgggca

SEQ ID NO: 969 - DNA, 20 bp, Artificial Sequence
  Antisense Oligonucleotide
atcggccggtgctgtacaat

SEQ ID NO: 970 - DNA, 20 bp, Artificial Sequence
  Antisense Oligonucleotide
aattggctcggcccccattc

SEQ ID NO: 971 - DNA, 20 bp, Artificial Sequence
  Antisense Oligonucleotide
tgcacgtactccatcgctga

SEQ ID NO: 972 - DNA, 20 bp, Artificial Sequence
  Antisense Oligonucleotide
cgggccacaatccgggcaat

SEQ ID NO: 973 - DNA, 20 bp, Artificial Sequence
  Antisense Oligonucleotide
aggcgcctcagtcgtatctt

SEQ ID NO: 974 - DNA, 20 bp, Artificial Sequence
  Antisense Oligonucleotide
ggcgcctcagtcgtatcttt

SEQ ID NO: 975 - DNA, 20 bp, Artificial Sequence
  Antisense Oligonucleotide
catcgctgacaaaagccccg

SEQ ID NO: 976 - DNA, 20 bp, Artificial Sequence
  Antisense Oligonucleotide
tccgcatctggtccagcgca

SEQ ID NO: 977 - DNA, 20 bp, Artificial Sequence
  Antisense Oligonucleotide
cgatgcttctccgcatctgg

SEQ ID NO: 978 - DNA, 20 bp, Artificial Sequence
  Antisense Oligonucleotide
ggccgacaatactttccgaa

SEQ ID NO: 979 - DNA, 20 bp, Artificial Sequence
  Antisense Oligonucleotide
ccgggccacaatccgggcaa

SEQ ID NO: 980 - DNA, 20 bp, Artificial Sequence
  Antisense Oligonucleotide
ccgatctaggcagatgttgg

SEQ ID NO: 981 - DNA, 17 bp, Artificial Sequence
  Antisense Oligonucleotide
accgggccacaatccgg

SEQ ID NO: 982 - DNA, 20 bp, Artificial Sequence
  Antisense Oligonucleotide
gccggtgctgtacaatgggg

SEQ ID NO: 983 - DNA, 20 bp, Artificial Sequence
  Antisense Oligonucleotide
ggccacaatccgggcaatct

SEQ ID NO: 984 - DNA, 20 bp, Artificial Sequence
  Antisense Oligonucleotide
ggacctcggccacttgatcc

SEQ ID NO: 985 - DNA, 20 bp, Artificial Sequence
  Antisense Oligonucleotide
agcatcggccggtgctgtac

SEQ ID NO: 986 - DNA, 16 bp, Artificial Sequence
  Antisense Oligonucleotide
tagccgatctaggcag

SEQ ID NO: 987 - DNA, 15 bp, Artificial Sequence
  Antisense Oligonucleotide
tagccgatctaggca

SEQ ID NO: 988 - DNA, 20 bp, Artificial Sequence
  Antisense Oligonucleotide
cggtgctgtacaatggggtc

SEQ ID NO: 989 - DNA, 15 bp, Artificial Sequence
  Antisense Oligonucleotide
gattgtcagtgcgct

SEQ ID NO: 990 - DNA, 15 bp, Artificial Sequence
  Antisense Oligonucleotide
ggattgtcagtgcgc

SEQ ID NO: 991 - DNA, 15 bp, Artificial Sequence
  Antisense Oligonucleotide
gagtcttttactcgc

SEQ ID NO: 992 - DNA, 15 bp, Artificial Sequence
  Antisense Oligonucleotide
cggtactggcgtatt

SEQ ID NO: 993 - DNA, 15 bp, Artificial Sequence
  Antisense Oligonucleotide
tcggtactggcgtat

SEQ ID NO: 994 - DNA, 15 bp, Artificial Sequence
  Antisense Oligonucleotide
ttcggtactggcgta

SEQ ID NO: 995 - DNA, 15 bp, Artificial Sequence
  Antisense Oligonucleotide
attcggtactggcgt

SEQ ID NO: 996 - DNA, 15 bp, Artificial Sequence
  Antisense Oligonucleotide
ccggctaattgtaac

SEQ ID NO: 997 - DNA, 16 bp, Artificial Sequence
  Antisense Oligonucleotide
tcggtactggcgtatt

SEQ ID NO: 998 - DNA, 16 bp, Artificial Sequence
  Antisense Oligonucleotide
ttcggtactggcgtat

SEQ ID NO: 999 - DNA, 16 bp, Artificial Sequence
  Antisense Oligonucleotide
attcggtactggcgta

SEQ ID NO: 1000 - DNA, 17 bp, Artificial Sequence
  Antisense Oligonucleotide
cggtactggcgtatttc

SEQ ID NO: 1001 - DNA, 17 bp, Artificial Sequence
  Antisense Oligonucleotide
tcggtactggcgtattt

SEQ ID NO: 1002 - DNA, 17 bp, Artificial Sequence
  Antisense Oligonucleotide
ttcggtactggcgtatt

SEQ ID NO: 1003 - DNA, 17 bp, Artificial Sequence
  Antisense Oligonucleotide
attcggtactggcgtat

SEQ ID NO: 1004 - DNA, 17 bp, Artificial Sequence
  Antisense Oligonucleotide
cattcggtactggcgta

SEQ ID NO: 1005 - DNA, 17 bp, Artificial Sequence
  Antisense Oligonucleotide
tcattcggtactggcgt

SEQ ID NO: 1006 - DNA, 20 bp, Artificial Sequence
  Antisense Oligonucleotide
ccaccagtttgtactcagtc

SEQ ID NO: 1007 - DNA, 20 bp, Artificial Sequence
  Antisense Oligonucleotide
ggattgtcagtgcgcttttc

SEQ ID NO: 1008 - DNA, 20 bp, Artificial Sequence
  Antisense Oligonucleotide
gctggattgtcagtgcgctt

SEQ ID NO: 1009 - DNA, 20 bp, Artificial Sequence
  Antisense Oligonucleotide
agctggattgtcagtgcgct

SEQ ID NO: 1010 - DNA, 20 bp, Artificial Sequence
  Antisense Oligonucleotide
tagctggattgtcagtgcgc

SEQ ID NO: 1011 - DNA, 20 bp, Artificial Sequence
  Antisense Oligonucleotide
attagctggattgtcagtgc

SEQ ID NO: 1012 - DNA, 20 bp, Artificial Sequence
  Antisense Oligonucleotide
gtattggtctctcatggcac

SEQ ID NO: 1013 - DNA, 20 bp, Artificial Sequence
  Antisense Oligonucleotide
gcctgtcctcatgtattggt

SEQ ID NO: 1014 - DNA, 20 bp, Artificial Sequence
  Antisense Oligonucleotide
cgcctgtcctcatgtattgg

SEQ ID NO: 1015 - DNA, 20 bp, Artificial Sequence
  Antisense Oligonucleotide
cttcgcctgtcctcatgtat

SEQ ID NO: 1016 - DNA, 20 bp, Artificial Sequence
  Antisense Oligonucleotide
gacttgctattattgatggc

SEQ ID NO: 1017 - DNA, 20 bp, Artificial Sequence
  Antisense Oligonucleotide
tgacttgctattattgatgg

SEQ ID NO: 1018 - DNA, 20 bp, Artificial Sequence
  Antisense Oligonucleotide
atccgcaaatgacttgctat

SEQ ID NO: 1019 - DNA, 20 bp, Artificial Sequence
  Antisense Oligonucleotide
tatccgcaaatgacttgcta

SEQ ID NO: 1020 - DNA, 20 bp, Artificial Sequence
  Antisense Oligonucleotide
tagaggttaatatccgcaaa

SEQ ID NO: 1021 - DNA, 20 bp, Artificial Sequence
  Antisense Oligonucleotide
gtagaggttaatatccgcaa

SEQ ID NO: 1022 - DNA, 20 bp, Artificial Sequence
  Antisense Oligonucleotide
tgtagaggttaatatccgca

SEQ ID NO: 1023 - DNA, 20 bp, Artificial Sequence
  Antisense Oligonucleotide
ctgtagaggttaatatccgc

SEQ ID NO: 1024 - DNA, 20 bp, Artificial Sequence
  Antisense Oligonucleotide
tgctccctgtagaggttaat

SEQ ID NO: 1025 - DNA, 20 bp, Artificial Sequence
  Antisense Oligonucleotide
tactcgcttaatctgctccc

SEQ ID NO: 1026 - DNA, 20 bp, Artificial Sequence
  Antisense Oligonucleotide
ttactcgcttaatctgctcc

SEQ ID NO: 1027 - DNA, 20 bp, Artificial Sequence
  Antisense Oligonucleotide
gagtcttttactcgcttaat

SEQ ID NO: 1028 - DNA, 20 bp, Artificial Sequence
  Antisense Oligonucleotide
atcaactgtccttgttggca

SEQ ID NO: 1029 - DNA, 20 bp, Artificial Sequence
  Antisense Oligonucleotide
gccagttcgtgggcttgttt

SEQ ID NO: 1030 - DNA, 20 bp, Artificial Sequence
  Antisense Oligonucleotide
ggccagttcgtgggcttgtt

SEQ ID NO: 1031 - DNA, 20 bp, Artificial Sequence
  Antisense Oligonucleotide
actcttggccagttcgtggg

SEQ ID NO: 1032 - DNA, 20 bp, Artificial Sequence
  Antisense Oligonucleotide
aactcttggccagttcgtgg

SEQ ID NO: 1033 - DNA, 20 bp, Artificial Sequence
  Antisense Oligonucleotide
taactcttggccagttcgtg

SEQ ID NO: 1034 - DNA, 20 bp, Artificial Sequence
  Antisense Oligonucleotide
cgtaactcttggccagttcg

SEQ ID NO: 1035 - DNA, 20 bp, Artificial Sequence
  Antisense Oligonucleotide
tggaatcccgtaactcttgg

SEQ ID NO: 1036 - DNA, 20 bp, Artificial Sequence
  Antisense Oligonucleotide
aatggaatcccgtaactctt

SEQ ID NO: 1037 - DNA, 20 bp, Artificial Sequence
  Antisense Oligonucleotide
gaatggaatcccgtaactct

SEQ ID NO: 1038 - DNA, 20 bp, Artificial Sequence
  Antisense Oligonucleotide
tgaatggaatcccgtaactc

SEQ ID NO: 1039 - DNA, 20 bp, Artificial Sequence
  Antisense Oligonucleotide
atgaatggaatcccgtaact

SEQ ID NO: 1040 - DNA, 20 bp, Artificial Sequence
  Antisense Oligonucleotide
caatgaatggaatcccgtaa

SEQ ID NO: 1041 - DNA, 20 bp, Artificial Sequence
  Antisense Oligonucleotide
gcgtatttctcttaccagtg

SEQ ID NO: 1042 - DNA, 20 bp, Artificial Sequence
  Antisense Oligonucleotide
ggtactggcgtatttctctt

SEQ ID NO: 1043 - DNA, 20 bp, Artificial Sequence
  Antisense Oligonucleotide
cggtactggcgtatttctct

SEQ ID NO: 1044 - DNA, 20 bp, Artificial Sequence
  Antisense Oligonucleotide
tcggtactggcgtatttctc

SEQ ID NO: 1045 - DNA, 20 bp, Artificial Sequence
  Antisense Oligonucleotide
ttcggtactggcgtatttct

SEQ ID NO: 1046 - DNA, 20 bp, Artificial Sequence
  Antisense Oligonucleotide
attcggtactggcgtatttc

SEQ ID NO: 1047 - DNA, 20 bp, Artificial Sequence
  Antisense Oligonucleotide
cattcggtactggcgtattt

SEQ ID NO: 1048 - DNA, 20 bp, Artificial Sequence
  Antisense Oligonucleotide
tcattcggtactggcgtatt

SEQ ID NO: 1049 - DNA, 20 bp, Artificial Sequence
  Antisense Oligonucleotide
ttcattcggtactggcgtat

SEQ ID NO: 1050 - DNA, 20 bp, Artificial Sequence
  Antisense Oligonucleotide
tttcattcggtactggcgta

SEQ ID NO: 1051 - DNA, 20 bp, Artificial Sequence
  Antisense Oligonucleotide
ttttcattcggtactggcgt

SEQ ID NO: 1052 - DNA, 20 bp, Artificial Sequence
  Antisense Oligonucleotide
ttttttcattcggtactggc

SEQ ID NO: 1053 - DNA, 20 bp, Artificial Sequence
  Antisense Oligonucleotide
gttttttcattcggtactgg

SEQ ID NO: 1054 - DNA, 20 bp, Artificial Sequence
  Antisense Oligonucleotide
agttttttcattcggtactg

SEQ ID NO: 1055 - DNA, 20 bp, Artificial Sequence
  Antisense Oligonucleotide
gtatcttgttacatcaccac

SEQ ID NO: 1056 - DNA, 20 bp, Artificial Sequence
  Antisense Oligonucleotide
agtatcttgttacatcacca

SEQ ID NO: 1057 - DNA, 20 bp, Artificial Sequence
  Antisense Oligonucleotide
gtgcagcttgaaagtggctc

SEQ ID NO: 1058 - DNA, 20 bp, Artificial Sequence
  Antisense Oligonucleotide
gtactaaactactgagagct

SEQ ID NO: 1059 - DNA, 20 bp, Artificial Sequence
  Antisense Oligonucleotide
tgtactaaactactgagagc

SEQ ID NO: 1060 - DNA, 20 bp, Artificial Sequence
  Antisense Oligonucleotide
gggagtaacaagaggtgcat

SEQ ID NO: 1061 - DNA, 20 bp, Artificial Sequence
  Antisense Oligonucleotide
aacagggagtaacaagaggt

SEQ ID NO: 1062 - DNA, 20 bp, Artificial Sequence
  Antisense Oligonucleotide
gttgctactttagagctcaa

SEQ ID NO: 1063 - DNA, 20 bp, Artificial Sequence
  Antisense Oligonucleotide
cagttgctactttagagctc

SEQ ID NO: 1064 - DNA, 20 bp, Artificial Sequence
  Antisense Oligonucleotide
gaaagttggatttaattacg

SEQ ID NO: 1065 - DNA, 20 bp, Artificial Sequence
  Antisense Oligonucleotide
gcatctgctctcaaatagat

SEQ ID NO: 1066 - DNA, 20 bp, Artificial Sequence
  Antisense Oligonucleotide
tataggtagtaacctatgaa

SEQ ID NO: 1067 - DNA, 20 bp, Artificial Sequence
  Antisense Oligonucleotide
gtataggtagtaacctatga

SEQ ID NO: 1068 - DNA, 20 bp, Artificial Sequence
  Antisense Oligonucleotide
attgtataggtagtaaccta

SEQ ID NO: 1069 - DNA, 20 bp, Artificial Sequence
  Antisense Oligonucleotide
cattgtataggtagtaacct

SEQ ID NO: 1070 - DNA, 20 bp, Artificial Sequence
  Antisense Oligonucleotide
acattgtataggtagtaacc

SEQ ID NO: 1071 - DNA, 20 bp, Artificial Sequence
  Antisense Oligonucleotide
ccctggtccattagcaccat

SEQ ID NO: 1072 - DNA, 20 bp, Artificial Sequence
  Antisense Oligonucleotide
accctggtccattagcacca

SEQ ID NO: 1073 - DNA, 20 bp, Artificial Sequence
  Antisense Oligonucleotide
gaccctggtccattagcacc

SEQ ID NO: 1074 - DNA, 20 bp, Artificial Sequence
  Antisense Oligonucleotide
tgaccctggtccattagcac

SEQ ID NO: 1075 - DNA, 20 bp, Artificial Sequence
  Antisense Oligonucleotide
ctgtgaccctggtccattag

SEQ ID NO: 1076 - DNA, 20 bp, Artificial Sequence
  Antisense Oligonucleotide
aaactgtgaccctggtccat

SEQ ID NO: 1077 - DNA, 20 bp, Artificial Sequence
  Antisense Oligonucleotide
gtaaagggtttgtgctaact

SEQ ID NO: 1078 - DNA, 20 bp, Artificial Sequence
  Antisense Oligonucleotide
ggtaaagggtttgtgctaac

SEQ ID NO: 1079 - DNA, 20 bp, Artificial Sequence
  Antisense Oligonucleotide
ccagtcatggtaaagggttt

SEQ ID NO: 1080 - DNA, 20 bp, Artificial Sequence
  Antisense Oligonucleotide
taccagggtattatctgcaa

SEQ ID NO: 1081 - DNA, 20 bp, Artificial Sequence
  Antisense Oligonucleotide
attaccagggtattatctgc

SEQ ID NO: 1082 - DNA, 20 bp, Artificial Sequence
  Antisense Oligonucleotide
ctgaggtgataagcctcagg

SEQ ID NO: 1083 - DNA, 20 bp, Artificial Sequence
  Antisense Oligonucleotide
actgaggtgataagcctcag

SEQ ID NO: 1084 - DNA, 20 bp, Artificial Sequence
  Antisense Oligonucleotide
gactgaggtgataagcctca

SEQ ID NO: 1085 - DNA, 20 bp, Artificial Sequence
  Antisense Oligonucleotide
catacaagggctattggcac

SEQ ID NO: 1086 - DNA, 20 bp, Artificial Sequence
  Antisense Oligonucleotide
gactaaacatgggcccacta

SEQ ID NO: 1087 - DNA, 20 bp, Artificial Sequence
  Antisense Oligonucleotide
tccatcttaggtcagtactc

SEQ ID NO: 1088 - DNA, 20 bp, Artificial Sequence
  Antisense Oligonucleotide
gtcttacaacttccacggac
